(19) United States
(12) Patent Application Publication
(10) Pub. No.: US 2025/0319115 A1
(43) Pub. Date: Oct. 16, 2025

(54) Compositions and Methods for Modulating Cytokines

(71) Applicant: Flagship Pioneering Innovations VII, LLC, Cambridge, MA (US)

(72) Inventors: Vinidhra Mani, Brookline, MA (US); Erica Gabrielle Weinstein, Newton, MA (US); Yann Paul Guy Régis Echelard, Jamaica Plain, MA (US); Avak Kahvejian, Lexington, MA (US); Patrick Shannon Pendergrast, Cambridge, MA (US); Tamara Ouspenskaia, Belmont, MA (US); Gabriel Humphrey Billings, Somerville, MA (US); Sungmin Baek, Cambridge, MA (US)

(21) Appl. No.: 18/869,163

(22) PCT Filed: May 25, 2023
(86) PCT No.: PCT/US2023/067486

§ 371 Date: Nov. 25, 2024

Related U.S. Application Data
(60) Provisional application No. 63/345,778, filed on May 25, 2022.

(51) Int. Cl. A61K 31/711; A61K 31/7105; A61K 48/00; C07K 16/18; C12N 9/22; C12N 15/113; G01N 1/28; G01N 33/68

(52) U.S. Cl. CPC A61K 31/711; A61K 31/7105; A61K 48/005; C07K 16/18; C12N 9/222; C12N 15/113; G01N 1/28; G01N 33/6863; C12N 2310/20; G01N 2800/50

(57) ABSTRACT

The disclosure provides, in various embodiments, compositions, such as polypeptides, polynucleotides, gene editing systems, small molecules, vectors or host cells, that comprise and/or modulate expression or activity of immune regulation-associated proteins, such as cytokines. The disclosure also provides, in various embodiments, methods of treating inflammation, aging, senescence, fibrosis, autoimmunity, cancer, an infection, and/or an immunological disease using an agent that comprises and/or modulates expression or activity of an immune regulation-associated protein, and methods of identifying said agent.

### INCORPORATION BY REFERENCE OF MATERIAL

[0001] This application claims the benefit of U.S. Provisional Application No. 63/345,778, filed on May 25, 2022. The entire teachings of the above application are incorporated herein by reference.

### INCORPORATION BY REFERENCE OF MATERIAL IN XML

[0002] This application incorporates by reference the Sequence Listing contained in the following eXtensible Markup Language (XML) file being submitted concurrently herewith: a) File name: 57081057002.xml; created May 24, 2023, 6,780,048 Bytes in size.

### BACKGROUND

[0003] The immune system's major function is to mediate protective immunity against pathogens, such as viruses, bacteria, fungi, parasites, and tumors. A variety of immune subversion mechanisms are often enhanced during cancer and chronic infections. Insufficient immune responses can lead to immunodeficiencies, susceptibility to infection, and cancer (e.g., tumor) progression. However, without tight regulation, the immune system can also promote acute and chronic inflammation, leading to immunopathology or autoimmunity. As potent signaling molecules that regulate inflammation, cytokines are essential to the function of the immune system, in health and disease. Therefore, there is a critical need to identify additional and novel therapeutic targets that regulate immune cells and immune responses, such as targets that function as or like cytokines, and targets that modulate cytokines.

### SUMMARY

[0004] The disclosure provided herein is based, in part, on the identification of non-canonical protein targets (e.g., proteins encoded by non-canonical open reading frames (ORFs)) for the regulation of an immune response.

[0005] In one aspect, the present disclosure relates to an agent that comprises and/or modulates (e.g., increases or decreases) the expression and/or activity of a target protein identified herein (e.g., a target protein in the Sequence Listing), or a variant thereof. In some embodiments, the agent comprises a target protein identified herein (e.g., a target protein in the Sequence Listing), or a variant thereof. In certain embodiments, the agent modulates (e.g., increases or decreases) the expression and/or activity of a target protein identified herein (e.g., a target protein in the Sequence Listing, or a variant thereof). In some embodiments, the agent comprises, consists essentially of, or consists of a polypeptide, a polynucleotide, a gene editing system, a small molecule, or a cell (e.g., a cell therapy). The agent can be an inhibitor or an activator of a target protein identified herein. In some embodiments, the agent modulates the expression of a target protein identified herein. In some embodiments, the agent modulates the activity of a target protein identified herein.

[0006] In another aspect, the disclosure provides a pharmaceutical composition comprising a target protein identified herein, and a pharmaceutically acceptable carrier.

[0007] In another aspect, the disclosure provides a pharmaceutical composition comprising an agent that modulates the expression or activity of a target protein identified herein, and a pharmaceutically acceptable carrier.

[0008] In other aspects, the disclosure relates to a polynucleotide encoding a polypeptide described herein, an expression vector comprising a polynucleotide encoding a polypeptide described herein, and a host cell comprising a polynucleotide encoding a polypeptide described herein.

[0009] In another aspect, the disclosure provides a method of detecting a disease or condition, or determining a likelihood of developing the disease or condition in a subject, comprising quantifying an expression or activity of a target protein in a sample from the subject, wherein the level of expression or activity of the target protein in the sample is indicative of the likelihood of developing the disease or condition in the subject, wherein the disease or condition is selected from inflammation, aging, senescence, fibrosis, autoimmunity, cancer (e.g., tumor), an immunological disease (e.g., a disease caused by dysregulation of the immune system), or a combination thereof. In certain embodiments, the disease or condition is or involves inflammation.

[0010] In another aspect, the disclosure provides a method of preparing a sample that is useful for determining a likelihood of developing a disease or condition in a subject, comprising:
[0011] a) obtaining or having obtained a sample from the subject;
[0012] b) adding a protease inhibitor, a control peptide, a standard peptide, or a combination thereof to the sample to prepare a sample that is useful for detecting a likelihood of developing cancer; and
[0013] c) quantifying an expression or activity of a target protein in the sample prepared in step b),
   wherein the disease or condition is selected from inflammation, aging, senescence, fibrosis, autoimmunity, cancer (e.g., tumor), an infection, an immunological disease (e.g., a disease caused by dysregulation of the immune system), or a combination thereof. In certain embodiments, the disease or condition is or involves inflammation.

[0014] In some embodiments, the method further comprises treating a subject who is predicted to have a likelihood of developing the disease or condition, comprising administering to the subject an effective amount of an agent that comprises and/or modulates the expression or activity of the target protein identified herein, or a pharmaceutical composition comprising the agent.

[0015] In another aspect, the disclosure provides a method of treating a disease or condition in a subject in need thereof (e.g., a human subject having a cancer), comprising administering to the subject an effective amount of an agent that comprises and/or modulates the expression or activity of a target protein identified herein, or a pharmaceutical composition comprising the agent.

[0016] In another aspect, the disclosure provides a method of selecting a subject suitable for treatment of a disease or condition, comprising quantifying an expression or activity of a target protein in a sample from the subject, and selecting the subject suitable for treatment of the disease or condition according to the level of expression or activity of the target protein in the sample, wherein the disease or condition is selected from inflammation, aging, senescence, fibrosis, autoimmunity, cancer (e.g., tumor), an infection, an immunological disease (e.g., a disease caused by dysregulation of the immune system), or a combination thereof. In certain embodiments, the disease or condition is or involves inflammation.

[0017] In another aspect, the disclosure provides a method of modulating the expression or activity of a target protein identified in the Sequence Listing, or a variant thereof in a cell (e.g., a cancer cell, such as a cancer cell in a subject), comprising contacting the cell (e.g., in vitro, ex vivo, or in vivo) with an agent that comprises and/or modulates the expression or activity of a target protein identified herein, or a pharmaceutical composition comprising the agent.

[0018] In another aspect, the disclosure provides a method of identifying an agent that modulates the expression or activity of a target protein identified herein, comprising:
[0019] a) contacting the target protein with an agent; and
[0020] b) determining whether the agent modulates the expression or activity of the target protein,
[0021] wherein a difference in the expression or activity of the target protein that has been contacted with the agent compared to a reference for the expression or activity of the target protein indicates that the agent modulates the expression or activity of the target protein.

### BRIEF DESCRIPTION OF THE DRAWINGS

[0022] The foregoing will be apparent from the following more particular description of example embodiments, as illustrated in the accompanying drawings in which like reference characters refer to the same parts throughout the different views. The drawings are not necessarily to scale, emphasis instead being placed upon illustrating embodiments.

[0023] FIG. 1 shows inhibition of Interferon Regulatory Factor (IRF) pathway by SEQ ID NO: 6516 protein treatment in THP-1 dual reporter cells. THP-1 dual reporter cells were incubated with increasing concentrations of the peptide (0, 2.5, 5, 7.5, and 10 PM) in the presence of lipopolysaccharide (LPS) for 24 hours. The relative IRF activity was assessed by measuring the reporter gene expression. Data are presented as mean±SD of 10 technical replicates. Asterisks denote statistical significance compared to LPS-only treated cells (**p<0.01, ****p<0.0001).

[0024] FIG. 2 shows selective Inhibition of IRF Response by SEQ ID NO: 6516 protein co-treatment with specific TLR agonists in THP-1 dual reporter cells. THP-1 dual reporter cells were treated with 10 different TLR agonists (TLR1/2, TLR2, TLR3, TLR4, TLR5, TLR6/2, TLR7, TLR8, and TLR9) in the presence of the SEQ ID NO: 6516 SEQ ID NO: 6516 protein (10 μM) or scramble protein for 24 hours. The relative IRF activity was assessed by measuring the reporter gene expression. Data are presented as mean±SD of 10 technical replicates per treatment group from a representative experiment. Asterisks denote statistical significance compared to respective TLR agonist with scramble protein treated cells (****p<0.0001). The protein inhibited IRF response when co-treated with TLR1/2, TLR4, and TLR6/2 agonists, while no significant effect was observed with TLR2, TLR3, TLR5, TLR7, TLR8, or TLR9 agonists.

[0025] FIG. 3A shows UMAP visualization of cluster analysis reveals 10 distinct PBMC cell subtypes, while FIG. 3B shows bar graphs display the count of upregulated and downregulated genes when treated with SEQ ID NO: 6516 protein compared to the scrambled protein control.

[0026] FIG. 4 shows inhibition of Interferon Regulatory Factor (IRF) pathway by SEQ ID NO: 6516 protein treatment in THP-1 dual reporter cells. THP-1 dual reporter cells were incubated with increasing concentrations of the peptide (0, 2.5, 5, 7.5, and 10 PM) in the presence of lipopolysaccharide (LPS) for 24 hours. The relative IRF activity was assessed by measuring the reporter gene expression. Data are presented as mean±SD of 10 technical replicates. Asterisks denote statistical significance compared to LPS-only treated cells (**p<0.01, ****p<0.0001).

[0027] FIG. 5 shows selective inhibition of IRF Response by SEQ ID NO: 6516 protein co-treatment with specific TLR agonists in THP-1 dual reporter cells. THP-1 dual reporter cells were treated with 10 different TLR agonists (TLR1/2, TLR2, TLR3, TLR4, TLR5, TLR6/2, TLR7, TLR8, and TLR9) in the presence of the SEQ ID NO: 6516 protein (10 μM) or scramble protein for 24 hours. The relative IRF activity was assessed by measuring the reporter gene expression. Data are presented as mean±SD of 10 technical replicates per treatment group from a representative experiment. Asterisks denote statistical significance compared to respective TLR agonist with scramble protein treated cells (****p<0.0001). The protein inhibited IRF response when co-treated with TLR1/2, TLR4, and TLR6/2 agonists, while no significant effect was observed with TLR2, TLR3, TLR5, TLR7, TLR8, or TLR9 agonists.

[0028] FIG. 6A shows UMAP visualization of cluster analysis reveals 10 distinct PBMC cell subtypes, while FIG. 6B shows bar graphs display the count of upregulated and downregulated genes when treated with SEQ ID NO: 6516 protein compared to the scrambled protein control.

[0029] FIG. 7 shows dose dependent reduction of hTNFa when compared to control (TA_H2O) on CD3/CD28 (TransAct) activated PBMCs. ***=p<0.0002 and ****=p<0.0001 compared to respective controls by two-way ANOVA.

[0030] FIG. 8 shows lack of IL-1b inhibition on CD3/CD28 (TransAct) activated PBMCs when compared to control (TA_H2O). Positive control shows significant inhibition. ****=p<0.0001 compared to respective controls by two-way ANOVA.

[0031] FIG. 9 shows relative activation of the IL-4 signaling pathway, determined through SEAP expression by measuring optical density at 600 nm.

[0032] FIG. 10 shows relative activation of the IL-15 signaling pathway, determined through SEAP expression by measuring optical density at 600 nm.

[0033] FIG. 11 shows relative activation of the IFN-alpha signaling pathway, determined through SEAP expression by measuring optical density at 600 nm.

[0034] FIGS. 12A-C shows SEQ ID NO: 4524 protein treatment increases T cell activation markers in CD8⁺ T cells. Isolated CD8⁺ T cells were incubated with either 10 μM scrambled protein or 10 μM SEQ ID NO: 4524 protein in the presence of T cell stimulator (CD3/CD28 antibody cocktail) for 24 hours. FIG. 12A shows concentration of TNFα measured by standard curve analysis. FIG. 12B shows concentrations of IL-2 measured by standard curve analysis. FIG. 12C shows percentage of CD69 positive cells was assessed by flow cytometry analysis using CD69 antibody staining, with no staining cells used as a negative gating control. Data are presented as mean of triplicates for each healthy donor of PBMC samples. Ratio paired t-test was used to analyze the data.

[0035] FIG. 13 shows effect of synthetic protein (SEQ ID NO: 4524) on CD8⁺ T cell activation and IFN-gamma production. Isolated CD8⁺ T cells were cultured with or without a CD3/CD28 stimulator and treated with three different concentrations (10 μM, 5 μM, and 1 μM) of either wildtype or point-mutant (C to A) peptides. Scrambled protein and no treatment were used as controls. Five technical duplicates were performed for each condition. After 3 days of culture, IFN-gamma production was measured using ELISA, and the concentration was calculated using a standard curve analysis. Error bars represent the standard deviation (SD) of the mean. Statistical analysis was performed using ordinary two-way ANOVA with Sidak's multiple comparison test and a single pooled variance (*p<0.05, ****p<0.0001).

[0036] FIG. 14 shows a schematic of target proteins genes cloned into the pFL69-TRE-rtTA-Blast (Cellecta #SVRTTATB-P) using the Bst XI restriction enzyme site.

### DETAILED DESCRIPTION

[0037] A description of example embodiments follows.

### Target Proteins

[0038] In one aspect, the disclosure provides a target protein identified herein. As used herein, the expressions “target protein identified herein” and “target protein of the disclosure” include the polypeptides disclosed in the Sequence Listing (e.g., a target protein comprising an amino acid sequence selected from SEQ ID NO: 6520, SEQ ID NO: 4227, SEQ ID NO: 6091, SEQ ID NO: 3702, SEQ ID NO: 3585, SEQ ID NO: 6516, SEQ ID NO: 1184, SEQ ID NO: 3915, SEQ ID NO: 1238_L8V, SEQ ID NO: 4524, SEQ ID NO: 3953, SEQ ID NO: 6519, SEQ ID NO: 5862, SEQ ID NO: 2758, SEQ ID NO: 6518, SEQ ID NO: 5843, SEQ ID NO: 4615, SEQ ID NO: 4174, SEQ ID NO: 5627, SEQ ID NO: 5631, SEQ ID NO: 6295, SEQ ID NO: 5848, SEQ ID NO: 5931, SEQ ID NO: 6517, SEQ ID NO: 3494, SEQ ID NO: 3462, SEQ ID NO: 4566, SEQ ID NO: 5537, SEQ ID NO: 5730). The target protein can be produced recombinantly (e.g., via DNA or mRNA) or synthetically.

[0039] In some embodiments, the target protein is an extracellular (secreted) protein.

[0040] In various embodiments, the target protein is a protein comprising an amino acid sequence set forth in the Sequence Listing. In some embodiments, the target protein consists of an amino acid sequence set forth in the Sequence Listing. In some embodiments, the target protein comprises an amino acid sequence having one amino acid substitution relative to an amino acid sequence set forth in the Sequence Listing, wherein the substitution is substitution of an N-terminal residue in an amino acid sequence in the Sequence Listing with a methionine (Met) residue. In some embodiments, the target protein consists of an amino acid sequence having one amino acid substitution relative to an amino acid sequence set forth in the Sequence Listing, wherein the substitution is substitution of an N-terminal residue in an amino acid sequence in the Sequence Listing with a methionine (Met) residue. In some embodiments, the target protein comprises an amino acid sequence set forth in the Sequence Listing and further comprises a methionine (Met) residue at its N-terminus. In some embodiments, the target protein consists of an amino acid sequence set forth in the Sequence Listing and a methionine (Met) residue at its N-terminus.

[0041] Certain of the target proteins in the Sequence Listing have been identified as being differentially expressed (e.g., upregulated or downregulated) in a disease and/or condition state selected from aging, senescence, fibrosis, autoimmunity, cancer (e.g., tumor), an infection, an immunological disease (e.g., inflammation and/or an autoimmune disease), or a combination thereof compared to a reference state (e.g., normal state) such that modulation of the level and/or activity of the target protein acts to treat, ameliorate, and/or prevent the development of the disease or condition.

[0042] Without wishing to be bound by theory, it is believed that certain of the target proteins disclosed herein function as or like cytokines, or modulate the expression or activity of cytokines. In some embodiments, target proteins disclosed herein decrease inflammation (e.g., by inhibiting interferon activity, such as type I interferon activity; by activating NFκB). In some embodiments, target proteins disclosed herein induce immune cell activation (e.g., by inducing IL-2 or TNF expression, activity, and/or secretion). In some embodiments, target proteins disclosed herein induce immune cell proliferation.

[0043] As used herein, the term “differential expression,” refers to at least one recognizable difference in protein expression. It may be a quantitatively measurable, semi-quantitatively estimable or qualitatively detectable difference in protein expression. Thus, a differentially expressed protein, or “DEP,” may have a higher expression level in a reference state (e.g., normal state) than in a disease state, in which the DEP has a lower expression level or is not expressed at all. Conversely, a DEP may have a higher expression level in a disease state than in a reference state (e.g., normal state), in which the DEP has a lower expression level or is not expressed at all. Further, expression may be regarded as differential if the DEP is recognizably changed (e.g., mutated) between two states under comparison. Recognizable changes can include amino acid substitutions, insertions, and/or deletions, including N- and C-terminal truncations, as well as modifications (e.g., post-translational modifications).

[0044] As used herein, the term “reference” refers to a standard used for comparison purpose(s). A person skilled in the art can select an appropriate reference for a particular comparison purpose(s). Thus, for example, a reference for a disease state may be a normal, healthy state; a reference for a mutated protein may be the non-mutated protein; a reference for a disease treatment may be no treatment or may be a standard of care treatment. In some embodiments, particularly embodiments involving methods of identifying an agent that modulates the expression and/or activity of a target protein, the reference is the activity and/or expression of the target protein in the absence of the agent. In some embodiments, a reference is based on a predetermined level, e.g., based on functional expression or empirical assays. In some embodiments, a reference obtained from one cell, sample or subject (e.g., a cell or sample from a healthy subject, a subject that does not have a particular disease; a healthy subject, a subject who does not have the particular disease). In some embodiments, a reference is obtained from more than one (e.g., a population of) cell, sample or subject (e.g., a cell or sample from a healthy subject, a subject that does not have a particular disease; a healthy subject, a subject who does not have a particular disease), such as 2, 3, 4, 5, 10, 20, 30, 50, 100 or more, or a statistically significant number of cells, samples or healthy subjects. A reference obtained from more than one cell, sample or subject can be represented as a statistic (e.g., an average or median).

[0045] In some embodiments, the protein is used as a marker of an immune and/or a disease state, for example, an exhausted T cell, a CD4⁺ T cell (e.g., Th1, Th2, Th17), a CD 8⁺ T cell, or a combination thereof.

[0046] In certain embodiments, the target protein has a higher expression level in an activated immune cell. In some embodiments, the target protein has an expression level in an activated immune cell that is at least about 0.5-fold higher, e.g., at least about: 0.6-, 0.7-, 0.8-, 0.9-, 1.0-, 1.1-, 1.2-, 1.3-, 1.4-, 1.5-, 1.6-, 1.7-, 1.8-, 1.9-, 2.0-, 2.5-, 3-, 3.5-, 4-, 5-, 6-, 7-, 8-, 9- or 10-fold higher (e.g., 50-fold higher, 100-fold higher) than the target protein expression level in a reference (e.g., a not activated immune cell of the same type).

[0047] In certain embodiments, the target protein has a lower expression level in an activated immune cell. In some embodiments, the target protein has an expression level in an activated immune cell that is at least about 0.5-fold lower, e.g., at least about: 0.6-, 0.7-, 0.8-, 0.9-, 1.0-, 1.1-, 1.2-, 1.3-, 1.4-, 1.5-, 1.6-, 1.7-, 1.8-, 1.9-, 2.0-, 2.5-, 3-, 3.5-, 4-, 5-, 6-, 7-, 8-, 9- or 10-fold lower (e.g., 50-fold lower, 100-fold lower) than the target protein expression level in a reference (e.g., a not activated immune cell of the same type).

[0048] In some embodiments, the target protein has an expression level in a disease (e.g., as determined from a sample from a cell or tissue of a subject having the disease) that is at least about 0.5-fold higher, e.g., at least about: 0.6-, 0.7-, 0.8-, 0.9-, 1.0-, 1.1-, 1.2-, 1.3-, 1.4-, 1.5-, 1.6-, 1.7-, 1.8-, 1.9-, 2.0-, 2.5-, 3-, 3.5-, 4-, 5-, 6-, 7-, 8-, 9- or 10-fold higher (e.g., 50 fold higher, 100-fold higher) than the target protein expression level in a reference (e.g., a sample from a cell or tissue of a subject who does not have the disease).

[0049] In some embodiments, the target protein has an expression level in a disease (e.g., as determined from a sample comprising or obtained from a cell or tissue of a subject having the disease) that is at least about 0.5-fold lower, e.g. at least about: 0.6-, 0.7-, 0.8-, 0.9-, 1.0-, 1.1-, 1.2-, 1.3-, 1.4-, 1.5-, 1.6-, 1.7-, 1.8-, 1.9-, 2.0-, 2.5-, 3-, 3.5-, 4-, 5-, 6-, 7-, 8-, 9- or 10-fold lower (e.g., 50-fold lower, 100-fold lower) than the target protein expression level in a reference (e.g., a sample from a cell or tissue of a subject who does not have the disease). In some embodiments, the target protein is not expressed, or is expressed at an undetectable level, in a disease (e.g., as determined from a sample comprising or obtained from a cell or tissue of a subject having the disease).

[0050] In some embodiments, the target protein has a transcript level in a disease (e.g., as determined from a sample from a cell or tissue of a subject having the disease) that is at least about 0.5-fold higher, e.g., at least about: 0.6-, 0.7-, 0.8-, 0.9-, 1.0-, 1.1-, 1.2-, 1.3-, 1.4-, 1.5-, 1.6-, 1.7-, 1.8-, 1.9-, 2.0-, 2.5-, 3-, 3.5-, 4-, 5-, 6-, 7-, 8-, 9- or 10-fold higher (e.g., 50 fold higher, 100-fold higher) than the target protein transcript level in a reference (e.g., a sample from a cell or tissue of a subject who does not have the disease). In particular embodiments, an increase in the transcript level of a target protein contributes to (e.g., results in) a disease or condition described herein.

[0051] In some embodiments, the target protein has a transcript level in a disease (e.g., as determined from a sample comprising or obtained from a cell or tissue of a subject having the disease) that is at least about 0.5-fold lower, e.g. at least about: 0.6-, 0.7-, 0.8-, 0.9-, 1.0-, 1.1-, 1.2-, 1.3-, 1.4-, 1.5-, 1.6-, 1.7-, 1.8-, 1.9-, 2.0-, 2.5-, 3-, 3.5-, 4-, 5-, 6-, 7-, 8-, 9- or 10-fold lower (e.g., 50-fold lower, 100-fold lower) than the target protein transcript level in a reference (e.g., a sample from a cell or tissue of a subject who does not have the disease). In some embodiments, the transcript of the target protein is not expressed, or is expressed at an undetectable level, in a disease (e.g., as determined from a sample comprising or obtained from a cell or tissue of a subject having the disease). In particular embodiments, a decrease in the transcript level of a target protein contributes to (e.g., results in) a disease or condition described herein.

[0052] In particular embodiments, the gene encoding the target protein comprises at least one mutation (e.g., a fusion, a deletion, an insertion, a point mutation, and/or an expansion of amino-acid repeats) in a disease described herein.

[0053] Non-limiting examples of (biological) samples include blood, blood components (e.g., serum or plasma), urine, saliva, amniotic fluid, cerebrospinal fluid, tissue (e.g., a biopsy or microbiopsy), pancreatic fluid, chorionic villus sample, and cells, etc., isolated from a subject.

[0054] In some embodiments, the target protein is translated from a non-coding RNA. In some embodiments, the non-coding RNA is a long intergenic non-coding RNA (lincRNA). In certain embodiments, the non-coding RNA is a long noncoding RNA (lncRNA). In some embodiments, the non-coding RNA is a microRNA (miRNA or miR).

[0055] In some embodiments, the target protein is translated from a non-exonic element in an unprocessed precursor mRNA (pre-mRNA). In some embodiments, the non-exonic element is an intron in a pre-mRNA. In some embodiments, the non-exonic element is a 5′-untranslated region (5′-UTR) in a pre-mRNA. In some embodiments, the non-exonic element is a 3′-untranslated region (3′-UTR) in a pre-mRNA.

[0056] In some embodiments, the target protein has a length of 2,000 amino acids or less, e.g., 1000 amino acids or less, 750 amino acids or less, 500 amino acids or less, 250 amino acids or less, 150 amino acids or less or 100 amino acids or less. In some embodiments, the target protein has a length of 7 amino acids or more, e.g., 8, 9, 10, 15, 18, 25, 50, 75 or 100 amino acids or more. In certain embodiments, the target protein has a length of from about 50 to about 200 amino acids, e.g., from about 100 to about 150 amino acids. In particular embodiments, the target protein has a length of 7 amino acids or more. In more particular embodiments, the target protein has a length of about 18 amino acids.

[0057] In some embodiments, a target protein of the disclosure is a modulator of one or more GPCRs. In some embodiments, a target protein is an agonist of one or more GPCRs. In some embodiments, a target protein is an antagonist of one or more GPCRs. In some embodiments, a target protein is a direct modulator of one or more GPCRs, such as a ligand for one or more GPCRs. In some embodiments, a target protein is an indirect modulator of one or more GPCRs.

[0058] The expression and/or activity of various GPCRs have been linked to different diseases/disorders, conditions and indications, including those set forth in Table A (see, e.g., Kenakin, T., Biased Receptor Signaling in Drug Discovery, Pharmacol Rev 71:267-315, April 2019; Harmar, A. J., et al., IUPHAR-DB: the IUPHAR database of G protein-coupled receptors and ion channels, Nucleic Acids Research, 2009, Vol. 37; and Davenport A P, Scully C C G, de Graaf C, Brown A J H, and Maguire J J. Advances in therapeutic peptides targeting G protein-coupled receptors. Nat Rev Drug Discov. 2020 Jun. 19(6):389-413; the contents of each are incorporated herein by reference in their entirety). Accordingly, in some embodiments, a target protein disclosed herein, which is a modulator of a GPCR, is useful for treating and/or diagnosing one or more diseases/disorders, conditions and/or indications, such as cancer or a pre-cancerous condition, or any of the diseases/disorders, conditions and indications listed in Table A, which are known to be associated with GPCR expression and/or activity.

TABLE A
GPCRs Associated with Disease

| Disease group | GPCRs Associated with Disease Group |
|---|---|
| acute disease | ADRB1, P2RY12, AGTR1 |
| breast disease | GNRHR |
| cancer or benign | ADRB2, ADRA1A, TSHR, SSTR3, SSTR1, GNRHR, CXCR4, CASR, |
| tumor | GCGR, ADRA1D, SSTR4, ADRA1B, OPRM1, SMO, TACR1, |
| | OPRK1, SSTR2, ADRB1, MC1R, SSTR5 |
| cardiovascular | ADRB3, OPRD1, ADRB2, ADRA1A, AGTR1, ADORA1, TSHR, |
| disease | HTR1D, PTGIR, HTR4, DRD2, F2R, HTR1B, FZD4, EDNRB, |
| | ADRA1D, ADORA2A, HTR1F, ADORA3, ADORA2B, CELSR1, |
| | CALCRL, ADRA1B, BDKRB2, OPRM1, ADRA2B, GLP1R, |
| | AVPR1A, P2RY12, OPRK1, PTGFR, ADRB1, ADRA2A, AVPR2, |
| | ADRA2C, EDNRA |
| chronic disease | ADORA3, ADORA2B, ADGRG6, ADRB2, CASR, GABBR1, |
| | AGTR1, GABBR2, ADORA1, CHRM3, CHRM1, ADORA2A |
| connective tissue | ADRB3, OPRD1, MC2R, OPRK1, CASR, PTGER3, OPRM1, |
| disease | ADRA2A, ADRA2B, ADRA2C, GNRHR |
| digestive system | CALCR, AGTR1, MTNR1B, GIPR, CHRM3, SSTR3, SSTR1, HTR4, |
| disease | PTGER3, GCGR, CHRM1, EDNRB, HRH2, DRD3, OPRM1, GLP1R, |
| | P2RY12, S1PR1, SSTR2, HTR1A, DRD4, MC1R, EDNRA, GLP2R, |
| | SSTR5 |
| disorder of | CALCR, S1PR4, AGTR1, GABBR2, CHRM3, GNRHR, KISS1R, |
| development or | S1PR3, FZD2, PTH1R, HRH1, S1PR2, EDNRB, LHCGR, ADGRG2, |
| morphogenesis | ADGRG6, CELSR1, GABBR1, SMO, S1PR1, MC2R, S1PR5, MC1R, |
| | EDNRA |
| disorder of | ADRB3, ADRB2, GPR179, GPR143, P2RY2, OPN1LW, CHRM3, |
| visual system | P2RY4, OPN1SW, GRM6, CASR, HRH1, CHRM1, FZD4, EDNRB, |
| | RHO, ADRA2B, ADGRV1, FZD5, CHRM2, P2RY1, PTGFR, |
| | ADRB1, ADRA2A, ADRA2C, P2RY6, OPN1MW |
| endocrine | CALCR, AGTR1, MTNR1B, MC4R, GIPR, TSHR, SSTR3, SSTR1, |
| system disease | TACR3, GNRHR, FSHR, KISS1R, PTH1R, CASR, GCGR, GHRHR, |
| | LHCGR, DRD3, SSTR4, GHSR, GLP1R, TACR1, P2RY12, MC2R, |
| | SSTR2, PROKR2, DRD4, MC1R, EDNRA, CHRM1, SSTR5 |
| genetic disorder | CNR1, GABBR2, MC4R, SSTR3, SSTR1, KISS1R, PTH1R, GHRHR, |
| | ADRA2B, GRM1, AVPR1A, P2RY12, HTR1A, PROKR2, OPN1MW, |
| | TBXA2R, ADRA1A, AGTR1, MTNR1B, OPN1LW, CHRM3, GRM7, |
| | HTR1D, GPR68, S1PR2, RHO, LHCGR, ADORA2A, ADORA3, |
| | ADORA2B, SSTR4, BDKRB2, LPAR6, ADGRV1, S1PR1, SSTR2, |
| | CHRM2, PTGFR, HRH3, CALCR, HTR2A, GPR143, MTNR1A, |
| | TACR3, HTR4, GNRHR, FSHR, GRM6, FZD2, CASR, EDNRB, |
| | ADRA1D, ADGRG2, ADGRG6, GABBR1, ADRA1B, OPRM1, |
| | SMO, FZD6, MC2R, ADRA2A, AVPR2, ADRA2C, CHRM1, SSTR5, |
| | ADRB3, GPR179, ADORA1, TSHR, OPN1SW, DRD2, CXCR4, |
| | FZD4, AVPR1B, HRH2, DRD3, CELSR1, CCR5, HTR2C, DRD4, |
| | MC1R, EDNRA |
| head and neck | ADRB3, ADRB2, GPR179, ADRA1A, GPR143, P2RY2, OPN1LW, |
| disorder | CHRM3, P2RY4, OPN1SW, GRM6, CASR, HRH1, FZD4, EDNRB, |
| | ADRA1D, RHO, OPN1MW, ADRA1B, ADRA2B, ADGRV1, FZD5, |
| | CHRM2, P2RY1, PTGFR, ADRB1, ADRA2A, ADRA2C, P2RY6, |
| | CHRM1 |
| hematologic | P2RY12, MC2R, CXCR4, TBXA2R, OPRM1, DRD4, AVPR2, |
| disease | AVPR1B, AVPR1A, SMO, DRD3 |
| idiopathic | HTR2A, CASR, HRH1, CNR1, GABBR2, EDNRB, EDNRA, HTR2C |
| disease | |
| immune system | ADRB3, CALCR, ADRA1A, S1PR4, GABBR2, TSHR, CHRM3, |
| disease | S1PR3, CXCR4, HRH1, S1PR2, GCGR, ADRA1D, CYSLTR1, |
| | CELSR1, GABBR1, ADRA1B, ADRA2B, GLP1R, CCR5, S1PR1, |
| | MC2R, CHRM2, S1PR5, PTGFR, ADRA2A, ADRA2C, CHRM1 |
| inflammatory | ADRB3, OPRD1, ADRB2, ADRA1A, AGTR1, P2RY2, TSHR, |
| disease | CHRM3, P2RY4, HRH1, PTGER3, ADRA1D, CYSLTR1, ADRA1B, |
| | BDKRB2, OPRM1, ADRA2B, S1PR1, MC2R, OPRK1, CHRM2, |
| | P2RY1, ADGRE2, PTGFR, ADRB1, ADRA2A, ADRA2C, P2RY6, |
| | CHRM1 |
| injury | PTH1R, HRH1, GABBR1, PTGER3, GABBR2, AVPR2, AVPR1B, |
| | AVPR1A, HRH2, CHRM1 |
| integumentary | ADRB3, HRH1, ADRA1A, GNRHR, ADRA1B, BDKRB2, ADGRE2, |
| system disease | LPAR6, EDNRA, ADRA2A, ADRA2B, EDNRB, MC1R, PTGFR, |
| | ADRA1D, ADRA2C, SMO, FZD6 |
| metabolic | ADRB3, OPRD1, CALCR, HTR2A, OXTR, CNR1, GPR143, AGTR1, |
| disease | GABBR2, MC4R, MTNR1A, GIPR, CHRM3, TSHR, MTNR1B, |
| | SSTR3, SSTR1, DRD2, CASR, GCGR, DRD3, ADORA2A, SSTR4, |
| | OPRM1, GRM1, GLP1R, HTR2C, P2RY12, OPRK1, SSTR2, |
| | CHRM2, DRD4, ADRA2A, MC1R, EDNRA, CHRM1, SSTR5 |
| musculoskeletal | ADRB3, OPRD1, ADRB2, CALCR, HTR2A, ADRA1A, AGTR1, |
| system disease | GABBR2, FZD2, PTH1R, CASR, PTGER3, EDNRB, ADRA1D, |
| | GABBR1, ADRA1B, OPRM1, ADRA2B, SMO, HTR2C, MC2R, |
| | OPRK1, ADRB1, ADRA2A, ADRA2C, EDNRA |
| nervous system | OPRD1, HCRTR1, DRD1, GRM3, CNR1, GABBR2, SSTR3, ADGRG1, |
| disease | SSTR1, GHRHR, HTR1F, HTR7, ADRA2B, GRM1, HCRTR2, P2RY12, |
| | HTR1A, S1PR5, OPN1MW, ADRB2, HTR2B, ADRA1A, AGTR1, MTNR1B, |
| | OPN1LW, HTR6, CHRM3, GRM7, HTR1D, S1PR3, S1PR2, RHO, |
| | ADORA2A, ADORA3, ADORA2B, SSTR4, DRD5, CALCRL, ADGRV1, |
| | HTR1E, S1PR1, SSTR2, CHRM2, HTR5A, HRH3, HTR2A, OXTR, GPR143, |
| | MTNR1A, HTR4, GRM6, CASR, HRH1, HTR1B, ADRA1D, GABBR1, |
| | ADRA1B, OPRM1, SMO, MC2R, OPRK1, ADRA2A, ADRA2C, CHRM1, |
| | SSTR5, GPR179, S1PR4, ADORA1, OPN1SW, DRD2, FZD4, DRD3, |
| | CYSLTR1, CELSR1, HTR2C, DRD4, ADRB1 |
| obstetric | ADRB3, OXTR, ADRA1A, PTGER3, ADRA1B, TSHR, ADRA2A, |
| disorder | ADRA2B, GLP1R, ADRA1D, ADRA2C |
| otorhinolaryngologic | ADRB3, ADRB2, CYSLTR1, HRH1, ADRA1A, CHRM2, ADRA1B, |
| disease | CHRM3, ADRA2A, ADRA2B, ADRB1, ADRA1D, ADRA2C, |
| | EDNRA, CHRM1 |
| psychiatric | OPRD1, HCRTR1, HTR2A, DRD1, OXTR, HTR2B, ADRA1A, |
| disorder | HRH3, GRM3, GABBR2, MTNR1A, HTR6, MTNR1B, HTR1D, |
| | HTR4, DRD2, HRH1, HTR1B, AVPR1B, DRD3, HTR1F, CYSLTR1, |
| | DRD5, GABBR1, OPRM1, HTR7, ADRA2B, GRM1, HCRTR2, |
| | AVPR1A, HTR2C, HTR1E, OPRK1, HTR1A, DRD4, ADRA2A, |
| | AVPR2, HTR5A, ADRA2C, CHRM1 |
| reproductive | ADRA1A, SSTR3, SSTR1, TACR3, GNRHR, FSHR, KISS1R, ADRA1D, |
| system disease | LHCGR, ADGRG2, DRD3, SSTR4, PTGER2, ADRA1B, PTGER1, CCR5, |
| | TACR1, SSTR2, PROKR2, DRD4, AVPR2, SSTR5 |
| respiratory | ADRB3, ADRB2, ADRA1A, AGTR1, ADORA1, CHRM3, PTGIR, CASR, |
| system disease | HRH1, EDNRB, ADRA1D, ADORA2A, ADORA3, ADORA2B, ADGRG6, |
| | CYSLTR1, ADRA1B, ADRA2B, CHRM2, ADRB1, ADRA2A, ADRA2C, |
| | EDNRA, CHRM1 |
| syndromic | HTR2A, P2RY2, GABBR2, CHRM3, SSTR3, P2RY4, SSTR1, HTR4, |
| disease | GNRHR, FSHR, KISS1R, DRD2, FZD2, CASR, EDNRB, LHCGR, DRD3, |
| | CYSLTR1, SSTR4, GABBR1, OPRM1, ADGRV1, HTR2C, P2RY12, MC2R, |
| | SSTR2, HTR1A, PROKR2, P2RY1, DRD4, P2RY6, CHRM1, SSTR5 |
| upper digestive | HTR4, HRH2 |
| tract disorder | |
| urinary system | ADRB3, ADRA1A, AGTR1, TSHR, CHRM3, CASR, EDNRB, |
| disease | AVPR1B, ADRA1D, ADORA2A, ADORA2B, ADRA1B, OPRM1, |
| | ADRA2B, AVPR1A, MC2R, CHRM2, ADRA2A, AVPR2, ADRA2C, |
| | EDNRA |

Agents that Modulate Target Proteins

[0059] Provided herein are agents that modulate the expression of a target protein disclosed herein, such as a target protein in the Sequence Listing, a variant thereof, or a fragment thereof (e.g., a biologically active fragment of a target protein). The expression of the target protein or variant or fragment thereof can be modulated by a wide range of processes, directly or indirectly, leading to an increase or a decrease of the target protein level. Non-limiting examples include altering: the copy number of the gene encoding the target protein, transcriptional initiation, elongation or termination, RNA processing, RNA stability (e.g., mRNA stability), RNA degradation, translation initiation, post-translational modification of a protein, protein stability, protein degradation (e.g., cleavage, such as protease cleavage), or a combination of the foregoing.

[0060] In some embodiments, the agent modulates (e.g., increases or decreases) the expression of a gene or gene transcript encoding the target protein. In some embodiments, the agent modulates the expression or activity of the target protein. In some embodiments, the agent decreases (e.g., inhibits, reduces or neutralizes) the activity of the target protein. In some embodiments, the agent increases (e.g., activates) the activity of the target protein. In some embodiments, the agent decreases (e.g., inhibits or downregulates) the expression of the target protein. In other embodiments, the agent increases (e.g., activates or upregulates) the expression of the target protein.

[0061] As used herein, the term “increasing” or “increase” refers to modulation that results in a higher level of expression, activity, function or a combination thereof of the target protein, or a metric (e.g., cancer cell death or DNA methylation of a target site), relative to a reference (e.g., the level prior to or in an absence of modulation by the agent). In some embodiments, the agent increases the expression or activity of the target protein, or the metric, by at least about 5% relative to the reference, e.g., by at least about: 10%, 15%, 20%, 25%, 30%, 35%, 40%, 45%, 50%, 55%, 60%, 65%, 70%, 75%, 80%, 85%, 90%, 95% or 98% relative to the reference.

[0062] As used herein, the term “decreasing” or “decrease” refers to modulation that results in a lower level of expression, activity, function or a combination thereof of the target protein, or a metric (e.g., cancer cell death or DNA methylation of a target site), relative to a reference (e.g., the level prior to or in an absence of modulation by the agent). In some embodiments, the agent decreases the expression or activity of the target protein, or the metric, by at least about 5% relative to the reference, e.g., by at least about: 10%, 15%, 20%, 25%, 30%, 35%, 40%, 45%, 50%, 55%, 60%, 65%, 70%, 75%, 80%, 85%, 90%, 95% or 98% relative to the reference.

[0063] Non-limiting examples of the metric include energy production or energy conversion in the liver (e.g., modulating ATP synthesis, B-oxidation, oxidation of metabolites derived from glycolysis, oxidation of metabolites derived from amino acids), mitochondrial transcription, mitochondrial ribosome assembly, mitochondrial translation, mitochondrial thermogenesis, hormonal signaling (e.g., mitochondrial estrogen receptor (mtER) signaling), redox maintenance (e.g., NADH and/or FADH2), cell cycle regulation, cell migration, cell morphology, apoptosis, necrosis, membrane potential, ion (e.g., calcium or zinc) storage, ion (e.g., calcium or zinc) homeostasis, metabolite synthesis (e.g., heme biosynthesis or steroid biosynthesis), nutrient sensing, unfolded protein stress response pathway, signaling processes (e.g., calcium signaling).

[0064] In some embodiments, the level of expression, activity, function or a combination thereof of the target protein, or the metric, is measured after the agent is contacted with (e.g., a cell) or administered (e.g., to a subject) for at least about 1 day, e.g., at least about: 2 days, 3 days, 4 days, 5 days, 6 days, 8 days, 9 days, 10 days, 1 week, 2 weeks, 3 weeks, 1 month, 2 months, 3 months, 4 months, 5 months or 6 months, e.g., after a treatment regimen has begun.

[0065] In some embodiments, the agent comprises, consists essentially of or consists of a polypeptide, a polynucleotide, a gene editing system, a small molecule, or a cell (e.g., a cell therapy).

[0066] In some embodiments, the target protein activates an immune cell, and the agent modulates (e.g., increases or decreases) the level of expression, activity, function or a combination thereof, of the target protein. In some embodiments, the target protein inhibits an immune cell (e.g., inhibits activation of an immune cell, induces immune cell death (e.g., apoptosis), or a combination thereof), and the agent modulates (e.g., increases or decreases) the level of expression, activity, function or a combination thereof of the target protein.

[0067] In certain embodiments, the agent modulates (e.g., increases or decreases) the level of expression, activity, function, or a combination thereof, of the target protein in a cancer cell (e.g., a metastatic cancer cell), a cell (e.g., stromal cell) in a tumor micro-environment, a target cell of an inflammatory response (e.g., an epithelial cell, an endothelial cell, a stem cell or a non-immune cell)), an immune cell (e.g., an effector T cell, a helper T cell, a Th1 cell, a Th2 cell, a Th17 cell, a B cell, an natural killer (NK) cell, an innate lymphoid cell (e.g., an ILC1 cell, an ILC2 cell, an ILC3 cell), a macrophage (e.g., an M1 macrophage, an M2 macrophage), a monocyte, and/or an antigen presenting cell (e.g., a dendritic cell), or a combination of the foregoing. In certain embodiments, the agent modulates the level of expression, activity, function or a combination thereof of the target protein in a tumor, a tumor microenvironment, a site of metastasis, a lymph node, a spleen, a secondary lymphoid organ, a tertiary lymphoid organ, a barrier tissue, skin, gut, an airway, a wound, another immune tissue, a non-immune tissue, or a combination of the foregoing.

[0068] In some embodiments, the agent modulates (e.g., increases or decreases) inflammation, decreases the level of an auto-antibody, increases an organ function, decreases the rate or number of relapses or flare-ups, decreases a viral load, controls infection, or a combination of the foregoing.

[0069] In some embodiments, the agent induces downregulation of the target protein (e.g., increases target-protein degradation); prevents multimerization (e.g., dimerization) of the target protein; sequesters a target protein (e.g., a secreted target protein); modulates (e.g., agonizes, antagonizes or disrupts) a known function of the target protein; decreases binding between the target protein and a binding partner (e.g., via steric hinderance); modulates (e.g., increases or decreases) a downstream cell signaling; induces phagocytosis of a cell expressing the target protein; or a combination of the foregoing. In certain embodiments, the agent lacks agonistic activity toward the target protein. In certain embodiments, the agent has agonistic activity toward the target protein. In some embodiments, the agent lacks antagonistic activity toward the target protein. In some embodiments, the agent has antagonistic activity toward the target protein. In particular embodiments, the agent binds to at least one residue of the target protein that is involved in binding to a binding partner. In some embodiments, the agent binds to one or more binding sites and/or domains of the target protein involved in binding of the target protein to the binding partner.

[0070] Non-limiting examples of binding partners include cytokine receptors and immune signaling receptors.

[0071] In some embodiments, the binding partner comprises:
[0072] a) a type I cytokine receptor (e.g., a type 1 interleukin receptor, an erythropoietin receptor, a GM-CSF receptor, a G-CSF receptor, a growth hormone receptor, a prolactin receptor, an Oncostatin M receptor, a leukemia inhibitory factor receptor);
[0073] b) a type II cytokine receptor (e.g., a type II interleukin receptor, an interferon-alpha/beta receptor, an interferon-gamma receptor);
[0074] c) a member of the immunoglobulin superfamily (e.g., an interleukin-1 receptor, a colony stimulating factor 1 receptor (CSF1R), a C-kit receptor, an interleukin-18 receptor);
[0075] d) a member of the Tumor necrosis factor receptor family (e.g., CD27, CD30, CD40, CD120, a lymphotoxin beta receptor);
[0076] e) a chemokine receptor (e.g., an interleukin-8 receptor, C-C chemokine receptor type 1 (CCR1), C-X-C chemokine receptor type 4 (CXCR-4), a MCAF receptor, a NAP-2 receptor);
[0077] f) a member of the Transforming growth factor (TGF) beta receptor family (e.g., TGF beta receptor 1, TGF beta receptor 2),
[0078] or a combination of the foregoing.

[0079] In some embodiments, the binding partner comprises:
[0080] a) a pattern recognition receptor (PRR) (e.g. a Toll-like receptor (TLR), a NOD-like receptor (NLR));
[0081] b) a killer activated receptor (KAR);
[0082] c) a killer inhibitor receptor (KIR);
[0083] d) a complement receptor;
[0084] e) a Fc receptor;
[0085] f) a B cell receptor;
[0086] g) a T cell receptor;
[0087] h) a cytokine receptor,
[0088] or a combination of the foregoing.

[0089] In some embodiments, the agent induces downregulation of a binding partner of the target protein; sequesters a binding partner (e.g., a secreted binding partner) of the target protein; prevents multimerization (e.g., dimerization) of a binding partner of the target protein; modulates (e.g., agonizes, antagonizes or disrupts) a known function of a binding partner of the target protein; decreases binding between the target protein and a binding partner (e.g., via steric hinderance); modulates (e.g., increases or decreases) a downstream cell signaling, or a combination of the foregoing. In certain embodiments, the agent lacks agonistic activity toward a binding partner of the target protein. In certain embodiments, the agent has agonistic activity toward a binding partner of the target protein. In some embodiments, the agent lacks antagonistic activity toward a binding partner of the target protein. In some embodiments, the agent has antagonistic activity toward a binding partner of the target protein. In some embodiments, the agent binds to the target-binding site of the binding partner. In particular embodiments, the agent further binds to at least one residue of a binding partner of the target protein that is involved in binding between the target protein and the binding partner. In more particular embodiments, the agent further binds to one or more binding sites and/or domains of a binding partner of the target protein involved in binding between the target protein and the binding partner.

[0090] In some embodiments, the agent modulates (e.g., activates or inhibits) immune signaling, cytokine signaling, inflammatory signaling, or a combination of the foregoing.

[0091] In some embodiments, the agent enhances a signal involved in T cell activation and/or survival. In certain embodiments, the agent activates a stimulatory checkpoint molecule. Non-limiting examples of stimulatory checkpoint molecules include CD27, CD28, CD40, CD122, CD137, OX40, GITR, inducible T-cell costimulator (ICOS). In particular embodiments, the agent is an agonist to CD28.

[0092] In some embodiments, the agent reduces a signal involved in T cell anergy and/or exhaustion. In certain embodiments, the agent inhibits an inhibitory checkpoint molecule. Non-limiting examples of inhibitory checkpoint molecules include PD-1, PD-L1, PD-L2, TIM-3, LAG-3, CTLA-4, A2AR, CD276, B7-H4, BTLA, IDO, KIR, NOX2, VISTA, SIGLECs 7 and SIGLECs 9.

[0093] In particular embodiments, the agent reduces the function of (e.g., a blocking antibody) to TNFα.

[0094] In certain embodiments, the agent modulates (e.g., increases or decreases) the level of expression, activity, function, or a combination thereof, of a variant of a target protein disclosed herein. In some embodiments, the variant comprises an amino acid sequence that is at least 70% identical to the amino acid sequence of a target protein disclosed herein. For example, the sequence identity to the variant can be at least about: 75%, 80%, 85%, 90%, 91%, 92%, 93%, 94%, 95%, 96%, 97%, 98% or 99%. In some embodiments, the sequence identity is about: 70%, 75%, 80%, 85%, 90%, 91%, 92%, 93%, 94%, 95%, 96%, 97%, 98% or 99%. In some embodiments, the sequence identity is about: 70-99%, 75-99%, 75-95%, 80-99%, 80-98%, 80-95%, 80-90%, 85-98%, 85-97%, 85-90%, 90-97%, 90-96%, 90-85%, 90-80% or 95-99%. In some embodiments, a variant comprises an amino acid sequence that is at least about 75%, at least about 80%, at least about 85%, at least about 90%, at least about 95%, or at least about 98% identical to the amino acid sequence of a target protein disclosed herein.

[0095] As used herein, the term “sequence identity,” refers to the extent to which two nucleotide sequences, or two amino acid sequences, have the same residues at the same positions when the sequences are aligned to achieve a maximal level of identity, expressed as a percentage. For sequence alignment and comparison, typically one sequence is designated as a reference sequence, to which a test sequences are compared. The sequence identity between reference and test sequences is expressed as the percentage of positions across the entire length of the reference sequence where the reference and test sequences share the same nucleotide or amino acid upon alignment of the reference and test sequences to achieve a maximal level of identity. As an example, two sequences are considered to have 70% sequence identity when, upon alignment to achieve a maximal level of identity, the test sequence has the same nucleotide or amino acid residue at 70% of the same positions over the entire length of the reference sequence.

[0096] Alignment of sequences for comparison to achieve maximal levels of identity can be readily performed by a person of ordinary skill in the art using an appropriate alignment method or algorithm. In some instances, the alignment can include introduced gaps to provide for the maximal level of identity. Examples include the local homology algorithm of Smith & Waterman, Adv. Appl. Math. 2:482 (1981), the homology alignment algorithm of Needleman & Wunsch, J. Mol. Biol. 48:443 (1970), the search for similarity method of Pearson & Lipman, Proc. Nat+l. Acad. Sci. USA 85:2444 (1988), computerized implementations of these algorithms (GAP, BESTFIT, FASTA, and TFASTA in the Wisconsin Genetics Software Package, Genetics Computer Group, 575 Science Dr., Madison, Wis.), and visual inspection (see generally Ausubel et al., Current Protocols in Molecular Biology).

[0097] When using a sequence comparison algorithm, test and reference sequences are input into a computer, subsequent coordinates are designated, if necessary, and sequence algorithm program parameters are designated. The sequence comparison algorithm then calculates the percent sequence identity for the test sequence(s) relative to the reference sequence, based on the designated program parameters. A commonly used tool for determining percent sequence identity is Protein Basic Local Alignment Search Tool (BLASTP) available through National Center for Biotechnology Information, National Library of Medicine, of the United States National Institutes of Health. (Altschul et al., 1990).

[0098] In some embodiments, the amino acid sequence of a variant of a target polypeptide disclosed herein comprises at least one amino acid substitution relative to the amino acid sequence of the target protein. In some embodiments, the number of amino acid substitutions in a variant relative to the amino acid sequence of a target protein disclosed herein is at least about: 2, 3, 4, 5, 6, 7, 8, 9, 10, 11, 12, 13, 14, 15, 16, 17, 18, 19, 20, 21, 22, 23, 24, 25, 26, 27, 28, 29, 30, 31, 32, 33, 34, 35, 36, 37, 38, 39, 40, 41, 42, 43, 44, 45, 46, 47, 48, 49, 50, 51, 52, 53, 54, 55, 56, 57, 58, 59 or 60. In some embodiments, the number of amino acid substitutions is at least about: 5, 6, 10, 15, 20, 25, 30, 35, 40, 45, 50, 55 or 60. In some embodiments, the number of amino acid substitutions is up to about: 60, 55, 50, 45, 40, 35, 30, 25, 20, 15, 10, 6 or 5. In some embodiments, the number of amino acid substitutions is about: 1-60, 1-55, 2-55, 2-50, 3-50, 3-45, 4-45, 4-40, 5-40, 5-35, 6-35, 6-30, 7-30, 7-25, 8-25, 8-20, 9-20, 9-15, 10-15, 5-60, 10-60, 10-55, 15-55, 15-50, 20-50, 20-45, 25-45, 25-40 or 30-40. In some embodiments, the number of amino acid substitutions is about: 10-35, 10-33, 11-33, 11-31, 12-31, 12-29, 13-29, 13-27, 14-27 or 14-25.

[0099] The amino acid substitution(s) in a variant can be substitutions with a canonical amino acid or a non-canonical amino acid. Non-canonical amino acids include, but are not limited to D amino acids, such as D versions of the canonical L-amino acids.

[0100] In some embodiments, an amino acid substitution is a conservative substitution. The term “conservative amino acid substitution(s)” or “conservative substitution(s)” refers to an amino acid substitution having a value of 0 or greater in BLOSUM62.

[0101] In some embodiments, an amino acid substitution is a highly conservative substitution. The term “highly conservative amino acid substitution(s)” or “highly conservative substitution(s)” refers to an amino acid substitution having a value of at least 1 (e.g., at least 2) in BLOSUM62.

[0102] In some embodiments, a variant of a target protein of the disclosure comprises about 5-60 amino acid substitutions, relative to the amino acid sequence of a target protein disclosed herein. In some embodiments, the amino acid substitutions include at least one conservative substitution. In some embodiments, the amino acid substitutions include at least one highly conservative substitution.

### a) Polypeptide Agents

[0103] The term “polypeptide” “peptide” or “protein” denotes a polymer of at least two amino acids covalently linked by an amide bond, regardless of length or post-translational modification (e.g., glycosylation or phosphorylation). A protein, peptide or polypeptide can comprise any suitable L- and/or D-amino acid, for example, common α-amino acids (e.g., alanine, glycine, valine), non-α-amino acids (e.g., β-alanine, 4-aminobutyric acid, 6-aminocaproic acid, sarcosine, statine), and unusual amino acids (e.g., citrulline, homocitruline, homoserine, norleucine, norvaline, ornithine). The amino, carboxyl and/or other functional groups on a peptide can be free (e.g., unmodified) or protected with a suitable protecting group. Suitable protecting groups for amino and carboxyl groups, and methods for adding or removing protecting groups are known in the art and are disclosed in, for example, Green and Wuts, “Protecting Groups in Organic Synthesis,” John Wiley and Sons, 1991. The functional groups of a protein, peptide or polypeptide can also be derivatized (e.g., alkylated) or labeled (e.g., with a detectable label, such as a fluorogen or a hapten) using methods known in the art. A protein, peptide or polypeptide can comprise one or more modifications (e.g., amino acid linkers, acylation, acetylation, amidation, methylation, terminal modifiers (e.g., cyclizing modifications), N-methyl-α-amino group substitution), if desired. In addition, a protein, peptide or polypeptide can be an analog of a known and/or naturally-occurring peptide, for example, a peptide analog having conservative amino acid residue substitution(s).

[0104] In some embodiments, the agent comprises a polypeptide. In some embodiments, the polypeptide is an isolated polypeptide (e.g., isolated or extracted from a biological sample or source). In some embodiments, the polypeptide is a recombinant polypeptide. In some embodiments, the polypeptide is an inhibitor (e.g., a direct inhibitor or an indirect inhibitor) of the expression and/or activity of a target protein disclosed herein. In some embodiments, the polypeptide is an activator (e.g., a direct activator or an indirect activator) of the expression and/or activity of a target protein disclosed herein. In some embodiments, the polypeptide decreases the expression or activity of the target protein disclosed herein. In other embodiments, the polypeptide increases the expression or activity of the target protein disclosed herein. In some embodiments, the polypeptide is a target protein disclosed herein, or a portion thereof (e.g., a biologically active portion thereof, such as a biologically active fragment of the target protein).

[0105] In some embodiments, the polypeptide is an immunoglobulin molecule, such as an antibody (e.g., a whole antibody, an intact antibody) or an antigen-binding fragment of an antibody. In some embodiments, the antibody or antigen-binding fragment thereof binds to the target protein. In some embodiments, the antibody or antigen-binding fragment thereof binds to a protein capable of modulating the expression or activity of the target protein.

[0106] In some embodiments, the polypeptide is an antibody. As used herein, the term “antibody” refers to an immunoglobulin molecule capable of specific binding to a target, such as a carbohydrate, polynucleotide, lipid, polypeptide, etc., through at least one antigen recognition site, located in the variable region of the immunoglobulin molecule. As used herein, the term “antibody” refers to a full-length antibody comprising two heavy (H) chains and two light (L) chains inter-connected by disulfide bonds or multimers thereof (for example, IgM). Each heavy chain comprises a heavy chain variable region (V_{H}) and a heavy chain constant region (comprising domains CH1, hinge CH2 and CH3). Each light chain comprises a light chain variable region (V_{L}) and a light chain constant region (CL). The V_{H} and the V_{L} regions may be further subdivided into regions of hypervariability, termed complementarity determining regions (CDR), interspersed within framework regions (FR). V_{H} and V_{L} each comprises three CDRs and four FR segments, arranged from the amino-terminus to the carboxy-terminus in the following order: FR1, CDR1, FR2, CDR2, FR3, CDR3, and FR4. The antibody can be of any species, such as a rodent (e.g., murine, rat, guinea pig) antibody, a human antibody, or the antibody can be a humanized antibody or chimeric antibody.

[0107] In some embodiments, the antibody comprises an IgA (e.g., IgA1 or IgA2) heavy chain constant region, an IgD heavy chain constant region, an IgE heavy chain constant region, an IgG (e.g., IgG1, IgG2 (e.g., IgG2a, IgG2b or IgG2c), IgG3 or IgG4) heavy chain constant region or an IgM heavy chain constant region. In some embodiments, the antibody comprises an IgG heavy chain constant region. In some embodiments, the antibody comprises a κ light chain constant region. In some embodiments, the antibody comprises a λ light chain constant region.

[0108] In some embodiments, the antibody is a polyclonal antibody. In some embodiments, the antibody is a monoclonal antibody. In some embodiments, the antibody is human or chimeric. In some embodiments, the antibody is primatized (e.g., humanized). In some embodiments, the antibody is multispecific, e.g., bi-, tri-, or quad-specific. In some embodiments, the antibody is a heteroconjugate antibody.

[0109] In some embodiments, the polypeptide agent is an antigen-binding fragment of an immunoglobulin molecule (e.g., antibody). The term “antigen-binding fragment” refers to a portion of an immunoglobulin molecule (e.g., antibody) that retains the antigen binding properties of the parental full-length antibody. Non-limiting examples of antigen-binding fragments include a V_{H} region, a V_{L} region, an Fab fragment, an F(ab′)2 fragment, an Fd fragment, an Fv fragment, and a domain antibody (dAb) consisting of one V_{H} domain or one V_{L} domain, etc. V_{H} and V_{L} domains may be linked together via a synthetic linker to form various types of single-chain antibody designs in which the V_{H}/V_{L} domains pair intramolecularly, or intermolecularly in those cases when the V_{H} and V_{L} domains are expressed by separate chains, to form a monovalent antigen binding site, such as single chain Fv (scFv) or diabody. In some embodiments, the polypeptide disclosed herein is an antigen binding fragment selected from Fab, Fab′, F(ab′)2, Fd, Fv, disulfide-linked Fvs (sdFv, e.g., diabody, triabody or tetrabody), scFv, SMIP or rlgG. In some embodiments, the polypeptide is a scFv. Antigen-binding fragments can be produced by recombinant DNA techniques, enzymatic or chemical cleavage of intact immunoglobulins, or, in certain cases, by chemical peptide synthesis procedures known in the art.

[0110] Polypeptide agents (e.g., monoclonal antibodies) can be monovalent, bivalent or multivalent. A monoclonal antibody can be monospecific or multispecific (e.g., bispecific). Monospecific antibodies bind one antigenic epitope. A multispecific antibody, such as a bispecific antibody or a trispecific antibody, is included in the term monoclonal antibody.

[0111] “Multispecific” refers to an antibody that specifically binds at least two distinct antigens or at least two distinct epitopes within the antigens, for example three, four or five distinct antigens or epitopes. “Bispecific” refers to an antibody that specifically binds two distinct antigens or two distinct epitopes within the same antigen.

[0112] “Isolated antibody” refers to an antibody or an antigen-binding fragment thereof that is substantially free of other antibodies having different antigenic specificities (e.g., an isolated anti-target protein antibody is substantially free of antibodies that specifically bind antigens other than the target protein). In the case of a bispecific antibody, the bispecific antibody specifically binds two antigens of interest, and is substantially free of antibodies that specifically bind antigens other than the two antigens of interest. In some embodiments, the polypeptide agent (e.g., monoclonal antibody) is at least 80% pure, e.g., about: 80%, 81%, 82%, 83%, 84%, 85%, 86%, 87%, 88%, 89%, 90%, 91%, 92%, 93%, 94%, 95%, 96%, 97%, 98%, 99% or 100% pure.

[0113] In some embodiments, the polypeptide is an antagonist antibody that binds to the target protein (e.g., a target protein whose expression or activity is increased in a cancer state relative to a reference state). In some embodiments, the antibody described herein is an antagonist antibody that binds to a protein capable of modulating the expression or activity of the target protein. As used herein, the term “antagonist antibody” refers to an antibody that, upon binding to an antigen (e.g., the target protein or a protein capable of modulating the expression or activity of the target protein), reduces (e.g., inhibits) the function of the antigen. In some embodiments, the antigen is a receptor, and the antagonist antibody binds to the ligand-binding domain of the receptor. In some embodiments, the antigen is a transmembrane protein, and the antagonist antibody binds to the extracellular region of the transmembrane protein. In some embodiments, the antigen is an enzyme or a signaling molecule, and the antagonist antibody reduces the activity of the enzyme or attenuate a signal transduction pathway mediated by the signaling molecule. In some embodiments, the antagonist antibody reduces antigen function by at least about 10%, e.g., by at least about: 15%, 20%, 25%, 30%, 35%, 40%, 45%, 50%, 55%, 60%, 65%, 70%, 75%, 80%, 90%, 95%, 98% or 99%.

[0114] In some embodiments, the polypeptide is an agonist antibody that binds to the target protein (e.g., a target protein whose expression or activity is decreased in a cancer state relative to a reference state). In some embodiments, the antibody is an agonist antibody that binds to a protein capable of modulating the expression or activity of the target protein. As used herein, the term “agonist antibody” refers to an antibody that, upon binding to an antigen (e.g., the target protein or a protein capable of modulating the expression or activity of the target protein), increases the function of the antigen. In some embodiments, the antigen is a receptor, and the agonist antibody binds to the ligand-binding domain of the receptor. In some embodiments, the antigen is a transmembrane protein, and the agonist antibody binds to the extracellular region of the transmembrane protein. In some embodiments, the antigen is an enzyme or a signaling molecule, and the agonist antibody increases the activity of the enzyme or activates a signal transduction pathway mediated by the signaling molecule. In some embodiments, the agonist antibody increases antigen function by at least about 10%, e.g., by at least about: 15%, 20%, 25%, 30%, 35%, 40%, 45%, 50%, 55%, 60, 65, 70%, 75%, 80%, 90%, 95%, 100%, 200%, 300%, 400%, 500%, 600%, 700%, 800%, 900% or 1,000%.

[0115] In some embodiments, the agonist antibody does not exert at least one of the following functional properties: reducing (e.g., inhibiting) the activity of the antigen; inducing antibody-dependent cell killing of a cell expressing the antigen (e.g., by natural killer (NK) cells, monocytes, macrophages, neutrophils, dendritic cells, or eosinophils); inducing phagocytosis of a cell expressing the antigen (e.g., by macrophage); inducing opsonization of a cell expressing the antigen; and inducing downregulation of the antigen on a cell surface (e.g., by hyper-crosslinking or clustering the antigen to induce internalization and degradation).

[0116] Suitable techniques, assays and reagents for making and using therapeutic antibodies against an antigen are known in the art. See, for example, Therapeutic Monoclonal Antibodies: From Bench to Clinic (Zhiqiang An eds., 1 st ed. 2009); Antibodies: A Laboratory Manual (Edward A. Greenfield eds., 2d ed. 2013); Ferrara et al., Using Phage and Yeast Display to Select Hundreds of Monoclonal Antibodies: Application to Antigen 85, a Tuberculosis Biomarker, PLoS ONE 7(11): e49535 (2012), for methods of making recombinant antibodies, including antibody engineering, use of degenerate oligonucleotides, 5′-RACE, phage display, and mutagenesis; antibody testing and characterization; antibody pharmacokinetics and pharmacodynamics; antibody purification and storage; and screening and labeling techniques.

[0117] In some embodiments, the polypeptide is an antibody mimetic that binds a target protein disclosed herein. The term “antibody mimetic” refers to polypeptides capable of mimicking an antibody's ability to bind an antigen, but structurally differ from native antibody structures. Non-limiting examples of antibody mimetics include Adnectins, Affibodies, Affilins, Affimers, Affitins, Alphabodies, Anticalins, Avimers, DARPins, Fynomers, Kunitz domain peptides, monobodies, nanobodies, nanoCLAMPs, and Versabodies.

[0118] In some embodiments (e.g., when the expression or activity of the target protein is decreased in a disease state relative to a reference state), the agent is a polypeptide (e.g., isolated polypeptide) that comprises an amino acid sequence that is at least 70% identical to at least a portion (e.g., a biologically active portion or fragment) of the target protein. For example, the percent identity can be at least about: 70%, 71%, 72%, 73%, 74%, 75%, 76%, 77%, 78%, 79%, 80%, 81%, 82%, 83%, 84%, 85%, 86%, 87%, 88%, 89%9, 90%, 91%, 92%, 93%, 94%, 95%, 96%, 97%, 98% or 99% to the full-length target protein or a biologically active portion or fragment thereof. In some embodiments, the polypeptide comprises the amino acid sequence of a full-length target protein. In some embodiments, the polypeptide comprising the amino acid sequence of a full-length target protein is a recombinant polypeptide. In some embodiments, the polypeptide comprising the amino acid sequence of a full-length target protein is a synthetic polypeptide.

[0119] In some embodiments, the polypeptide (e.g., isolated polypeptide) comprises an amino acid sequence having at least 1 amino acid substitution relative to the target protein. For example, the number of amino acid substitutions can be at least about: 2, 3, 4, 5, 6, 7, 8, 9, 10, 11, 12, 13, 14, 15, 16, 17, 18, 19 or 20, or about: 1-20, 1-19, 2-19, 2-18, 2-17, 3-17, 3-16, 4-16, 4-15, 5-15, 5-14, 6-14, 6-13, 7-13, 7-12, 8-12, 8-11 or 9-11. In some embodiments, the amino acid substitutions are conservative substitutions. In some embodiments, the amino acid substitutions are highly conservative substitutions.

[0120] In some embodiments, the polypeptide (e.g., isolated polypeptide) comprises an amino acid sequence that is at least 70% identical to at least a portion of a protein capable of modulating the expression or activity of the target protein. For example, the percent identity can be at least about: 71%, 72%, 73%, 74%, 75%, 76%, 77%, 78%, 79%, 80%, 81%, 82%, 83%, 84%, 85%, 86%, 87%, 88%, 89%, 90%, 91%, 92%, 93%, 94%, 95%, 96%, 97%, 98% or 99%. In some embodiments, the polypeptide comprises the amino acid sequence of a protein capable of modulating the expression or activity of the target protein.

[0121] In some embodiments, the polypeptide (e.g., isolated polypeptide) comprises an amino acid sequence having at least 1 amino acid substitution relative to a protein capable of modulating the expression or activity of the target protein. For example, the number of amino acid substitutions can be at least about: 2, 3, 4, 5, 6, 7, 8, 9, 10, 11, 12, 13, 14, 15, 16, 17, 18, 19 or 20, or about: 1-20, 1-19, 2-19, 2-18, 2-17, 3-17, 3-16, 4-16, 4-15, 5-15, 5-14, 6-14, 6-13, 7-13, 7-12, 8-12, 8-11 or 9-11. In some embodiments, the amino acid substitutions are conservative substitutions. In some embodiments, the amino acid substitutions are highly conservative substitutions.

[0122] In some embodiments, the polypeptide is a cell-penetrating peptide. In certain embodiments, the polypeptide is linked to a cell-penetrating peptide. Suitable cell-penetrating peptide sequences can be protein-derived, designed or, chimeric (modified). See, e.g., Regberg, et al., Applications of cell-penetrating peptides for tumor targeting and future cancer therapies, Pharmaceuticals 5(9): 991-1007 (2012). Non-limiting examples of cell-penetrating peptides include TAT (48-60), Penetratin, pVEC, MPG8, Transportan, Transportan10, PepFect3, PepFect 6, PepFect 14, Polyarginine, Stearyl-polyarginine, Pep-1, Pep-3, CADY, YTA2, YTA4, SynB1, SynB3, Maurocalcine and PTD4.

[0123] In some embodiments, the polypeptide is a circulating factor (e.g., a cytokine).

[0124] In some embodiments, the biological properties (e.g., biological activities or half-life) of the polypeptide (e.g., isolated polypeptide) and the target protein are similar. Non-limiting examples of biological activities include enzymatic activities or properties (e.g., selectivity, steady-state or kinetics), binding activities (e.g., nucleic acid (DNA, RNA) binding protein binding) or properties (e.g., specificity, affinity or kinetics), cell signaling activities, immunological activities, and structural activity (e.g., cell adhesion), among others. Non-limiting examples of enzyme activities include transferase activity (e.g., transfers functional groups from one molecule to another), oxioreductase activity (e.g., catalyzes oxidation-reduction reactions), hydrolase activity (e.g., cleaves chemical bonds via hydrolysis), lyase activity (e.g., generate a double bond), ligase activity (e.g., joining two molecules via a covalent bond), and isomerase activity (e.g., catalyzes structural changes within a molecule from one isomer to another).

[0125] In some embodiments, the polypeptide (e.g., isolated polypeptide) is a recombinant protein. In other embodiments, the polypeptide (e.g., isolated polypeptide) is a synthetic protein. Methods of producing therapeutic polypeptides are known in the art. See, e.g., Therapeutic Proteins: Methods and Protocols (Mark C. Smales & David C James eds., 2005); Pharmaceutical Biotechnology: Fundamentals and Applications (Daan J. A. Crommelin, Robert D. Sindelar & Bernd Meibohm eds., 2013). Polypeptides can be expressed recombinantly using mammalian cells, insect cells, yeast or bacteria etc., under the control of appropriate promoters.

[0126] In some embodiments, the polypeptides described herein (e.g., target proteins, or a portion thereof, polypeptide agents that modulate target proteins) are modified, for example, by cleavage (e.g., protease cleavage) or post-translational modification. In certain embodiments, the modification(s) will affect the activity of the polypeptide, for example, by making an inactive polypeptide active or by altering (e.g., increasing, decreasing) the level of activity of a polypeptide. In particular embodiments, a polypeptide described herein is provided as a prodrug, e.g., that can be converted (e.g., by proteolytic cleavage, post-translational modification) to an active polypeptide in vivo. In some embodiments, the polypeptide includes a post-translational modification or other chemical modification. Non-limiting examples of post-translational modifications include acetylation, amidation, formylation, glycosylation, hydroxylation, methylation, myristoylation, phosphorylation, deamidation, prenylation (e.g., farnesylation, geranylation, etc.), ubiquitylation, ribosylation and sulphation. Phosphorylation can occur on an amino acid such as tyrosine, serine, threonine, or histidine.

[0127] In some embodiments, the polypeptide is joined to a heterologous peptide or protein (e.g., via a covalent bond such as a peptide bond, or a non-covalent bond), such as in a conjugate or fusion protein. In some embodiments, the polypeptide comprises a tag (e.g., a detectable label, such as a fluorophore or enzyme, or a purification tag, such as an epitope tag).

[0128] In some embodiments, the polypeptide comprises one or more neoantigens selected from the Sequence Listing, or a variant thereof. As used herein, the term “neoantigen” refers to a tumor antigen that arises from a target protein described herein. In some embodiments, the neoantigen is a cancer-specific neoantigen. There are a variety of ways to produce a neoantigen. For example, a neoantigen may be produced in vitro as a polypeptide before being formulated into a neoplasia vaccine or immunogenic pharmaceutical composition. In some embodiments, the immunogenic pharmaceutical composition comprises an effective amount of one or more neoantigens or pharmaceutically acceptable salt(s) thereof. In some embodiments, the immunogenic pharmaceutical composition further comprises a pharmaceutically acceptable carrier, excipient, adjuvant or additive.

[0129] Alternatively, a neoantigen may be produced in vivo by introducing a polynucleotide or an expression vector (e.g., a viral expression vector) encoding the neoantigen into a cell or tissue (e.g., of a subject in need). In certain embodiments, the polypeptide comprises at least two neoantigens. In some embodiments, the polypeptide comprises a T cell enhancer amino acid sequence. In some embodiments, the T cell enhancer is selected from the group consisting of an invariant chain, a leader sequence of tissue-type plasminogen activator, a PEST sequence, a cyclin destruction box, a ubiquitination signal, and a SUMOylation signal.

### b) Polynucleotide Agents

[0130] In some embodiments, the agent comprises a polynucleotide, or an analog or derivative thereof. In some embodiments, the polynucleotide, or the analog or derivative thereof, is an inhibitor of the target protein. In some embodiments, the polynucleotide, or the analog or derivative thereof, is an activator of the target protein. In some embodiments, the polynucleotide, or the analog or derivative thereof, decreases (e.g., reduces or neutralizes) the expression or activity of the target protein. In other embodiments, the polynucleotide, or the analog or derivative thereof, increases the expression or activity of the target protein.

[0131] The polynucleotides can have sequences containing naturally occurring ribonucleotide or deoxyribonucleotide monomers, non-naturally occurring nucleotides, or combinations thereof. Accordingly, polynucleotides can include, for example, nucleotides comprising naturally occurring bases (e.g., A, G, C, or T) and nucleotides comprising modified bases (e.g., 7-deazaguanosine, inosine, or methylated nucleotides, such as 5-methyl dCTP and 5-hydroxymethyl cytosine). In some embodiments, the polynucleotide comprises at least one modified nucleotide. Non-limiting examples of modified nucleotides include 2′-fluoro, 2′-o-methyl, 2′-deoxy, unlocked nucleic acid, 2′-hydroxy, phosphorothioate, 2′-thiouridine, 4′-thiouridine and 2′-deoxyuridine. In some embodiments, the modification increases nuclease resistance, increases serum stability, decrease immunogenicity, or a combination of the foregoing.

[0132] In some embodiments, the polynucleotide is a DNA molecule. In some embodiments, the polynucleotide is an RNA molecule. In some embodiments, the polynucleotide is a vector (e.g., expression vector, plasmid).

[0133] In some embodiments, the polynucleotide comprises an analog or a derivative of a polynucleotide. In some embodiments, the analog or derivative is a peptide nucleic acid (PNA). In some embodiments, the analog or derivative is a locked nucleic acid (LNA). In some embodiments, the analog or derivative is a morpholino oligonucleotide. In some embodiments, the analog or derivative comprises one or more phosphorothioate-linkages. In some embodiments, the agent comprises a deoxyribonucleic guanidine (DNG) nucleotide. In some embodiments, the agent comprises ribonucleic guanidine (RNG) nucleotide.

[0134] In some embodiments, the polynucleotide modulates the expression and/or activity of a nucleic acid encoding a target protein disclosed herein (e.g., a target protein in the Sequence Listing), or a portion thereof (e.g., a biologically active portion or fragment thereof).

[0135] In some embodiments, the polynucleotide comprises a nucleotide sequence that is complementary (e.g., fully complementary or partially complementary) to at least a portion of a gene or gene transcript encoding a target protein disclosed herein, such that the polynucleotide sequence is capable of hybridizing or annealing to the gene or gene transcript (e.g., under physiological conditions). In other embodiments, the polynucleotide comprises a nucleotide sequence that is complementary to at least a portion of a gene or gene transcript encoding a protein that is capable of modulating the expression or activity of a target protein disclosed herein.

[0136] In some embodiments, the polynucleotide encodes a target protein disclosed herein, or a variant thereof (e.g., a biologically active variant thereof), or a portion thereof (e.g., a biologically active portion or fragment thereof).

[0137] In some embodiments, the nucleic acid that encodes the target protein, or variant thereof, or portion (e.g., fragment) thereof, is a gene sequence or a portion thereof. In some embodiments, the encoding nucleic acid is an unprocessed RNA transcript (e.g., pre-mRNA) or a portion thereof (e.g., a 5′-UTR, a 3′-UTR, an intron). In some embodiments the encoding nucleic acid is a mRNA molecule or a portion thereof. In some embodiments the encoding nucleic acid is present in a non-coding RNA (e.g., a long intergenic non-coding RNA (lincRNA), long noncoding RNA (lncRNA), or miRNA).

[0138] The encoding nucleic acid can comprise a canonical open reading frame (ORF) or a non-canonical ORF. In certain embodiments, the encoding nucleic acid comprises a non-canonical ORF.

[0139] The polynucleotides can be single stranded (ss) or double stranded (ds). In some embodiments, the polynucleotide is double stranded (ds). In some embodiments, the length of the ds polynucleotide is about 15-50 base pairs, e.g., about: 15-45, 15-40, 15-35, 15-30, 15-25, 18-50, 18-45, 18-40, 18-35, 18-30, 18-25, 20-50, 20-45, 20-40, 20-35, 20-30, 20-25, 25-50, 25-45, 25-40, 25-35, 25-30, 30-50, 30-45, 30-40, 30-35, 35-50, 35-45, 35-40 or 40-50 base pairs. In some embodiments, the length of the polynucleotide is about 19-23 base pairs. In some embodiments, the length of the polynucleotide is about 21 base pairs.

[0140] In some embodiments, the polynucleotide is single stranded (ss). In some embodiments, the length of the ss polynucleotide is about 15-50 nucleotides, e.g., about: 15-45, 15-40, 15-35, 15-30, 15-25, 18-50, 18-45, 18-40, 18-35, 18-30, 18-25, 20-50, 20-45, 20-40, 20-35, 20-30, 20-25, 25-50, 25-45, 25-40, 25-35, 25-30, 30-50, 30-45, 30-40, 30-35, 35-50, 35-45, 35-40 or 40-50 nucleotides.

[0141] In some embodiments, the polynucleotide prevents the maturation of a newly-generated nuclear RNA transcript into an mRNA for transcription. In some embodiments, the polynucleotide comprises a nucleotide sequence that is complementary to a sequence at the boundary of an intron and an exon.

[0142] In some embodiments, the polynucleotide (e.g., an antisense oligonucleotide) can hybridize to an mRNA encoding the target protein (e.g., under physiological conditions). In some embodiments, the length of the polynucleotide is at least about 10 nucleotides, e.g., at least about: 15, 16, 17, 18, 19, 20, 21, 22, 23, 24, 25, 26, 27, 28, 29 or 30 nucleotides or about: 10-30, 15-30, 15-25, 20-25 nucleotides. In some embodiments, the polynucleotide is at least 75% identical to an antisense sequence of identical the targeted transcript, e.g., at least about: 80%, 85%, 90%, 95%, 96%, 97%, 98% or 99%.

[0143] In some embodiments, the polynucleotide further comprises an overhang sequence (e.g., unpaired, overhanging nucleotides which are not directly involved in the formation of the double helical structure by the core sequences). In some embodiments, the polynucleotide comprises a 3′ overhang, a 5′ overhang, or both. In some embodiments, the overhang is about 1-5 nucleotides. In some embodiments, the overhang comprises a modified ribonucleotide or deoxynucleotide, e.g., a thiophosphate, phosphorothioate or deoxynucleotide inverted (3′ to 3′ linked) nucleotide.

[0144] Non-limiting examples of polynucleotide agents suitable for use in the compositions, kits and methods described herein include a small interfering RNA (siRNA), a short hairpin RNA (shRNA), a microRNA (miRNA), an antagomir, an antisense DNA, an antisense RNA, a morpholino nucleic acid (MNA), a locked nucleic acid (LNA), a peptide nucleic acid (PNA), an aptamer and a guide RNA (gRNA).

[0145] In some embodiments, the polynucleotide inhibits gene expression (e.g., through the biological process of RNA interference (RNAi)). Polynucleotides appropriate for RNA interference can be readily designed and produced by a person of ordinary skill using techniques, assays and reagents known in the art, including computational tools. See, e.g., Pei et al. 2006, Reynolds et al. 2004, Khvorova et al. 2003, Schwarz et al. 2003, Ui-Tei et al. 2004, Heale et al. 2005, Chalk et al. 2004, Amarzguioui et al. 2004.

[0146] In some embodiments, the polynucleotide is a miRNA. In some embodiments, the miRNA is about 22 nucleotides in length. miRNAs bind to target sites on mRNA molecules and silence the mRNA, e.g., by causing cleavage of the mRNA, destabilization of the mRNA, or inhibition of translation of the mRNA.

[0147] In some embodiments, the polynucleotide is a siRNA. In some embodiments, the siRNA comprises a nucleotide sequence that is identical to about a 15-25 contiguous mRNA sequence encoding the target protein. In some embodiments, the siRNA is a double-stranded RNA molecule having about 19-25 base pairs. In some embodiments, the siRNA commences with the dinucleotide AA. In some embodiments, the siRNA has a GC-content of about 30-70%, e.g., about: 30-65%, 30-60%, 30-55%, 30-50%, 40-70%, 40-65%, 40-60%, 40-55%, 45-70%, 45-65%, 45-60% or 45%-55%.

[0148] In some embodiments, the polynucleotide is a shRNA. A shRNA is an RNA molecule including a hairpin turn that decreases expression of target genes via RNAi. shRNAs can be delivered to cells in the form of plasmids, e.g., viral or bacterial vectors, e.g., by transfection, electroporation, or transduction.

[0149] siRNAs and shRNAs resemble intermediates in the processing pathway of the endogenous microRNA (miRNA) genes (see, e.g., Bartel, Cell 116:281-97 (2004)). In some embodiments, the siRNA functions as an miRNA; in other embodiments, the miRNA functions as an siRNA (see, e.g., Zeng et al., Mol Cell 9:1327-33 (2002); Doench et al., and Genes Dev 17:438-42 (2003)). MicroRNAs, like siRNAs, use RISC to downregulate target genes, but unlike siRNAs, most animal miRNAs do not cleave the mRNA. Instead, miRNAs reduce protein output through translational suppression or polyA removal and mRNA degradation (see, e.g., Wu et al., Proc Natl Acad Sci USA 103:4034-39 (2006)). Known miRNA binding sites are within mRNA 3′ UTRs; miRNAs seem to target sites with near-perfect complementarity to nucleotides 2-8 from the miRNA's 5′ end (see, e.g., Rajewsky, Nat Genet 38 Suppl: S8-13 (2006) and Lim et al., Nature 433:769-73 (2005)). This region is known as the seed region. Because siRNAs and miRNAs are interchangeable, exogenous siRNAs downregulate mRNAs with seed complementarity to the siRNA (see, e.g., Birmingham et al., Nat Methods 3:199-204 (2006)). Multiple target sites within a 3′ UTR give stronger downregulation (see, e.g., Doench et al., Genes Dev 17: 438-42 (2003)).

[0150] In some embodiments, the polynucleotide is a messenger RNA (mRNA) or a circular RNA (circRNA) encoding a target protein disclosed herein or a variant thereof (e.g., a variant that is at least about 70% identical (e.g., at least about: 75%, 80%, 85%, 90%, 95%, 98% or 99% identical to the wild-type protein). In some embodiments, the mRNA is codon optimized (e.g., to improve efficacy of protein synthesis and limit mRNA destabilization by rare codons (see, e.g., Presnyak et al., Cell. 160 (6): 1111-24 (2015) and Thess et al., Mol Ther. 23(9): 1456-64 (2015)).

[0151] In some embodiments, a polynucleotide comprising RNA is chemically synthesized. In some embodiments, a polynucleotide comprising RNA is expressed recombinantly. In some embodiments, the RNA is transcribed in vitro. The making and using of RNA therapeutics are known in the art. See, for example, RNA Therapeutics: Function, Design, and Delivery (Mouldy Sioud eds., 2010) and Kaczmarek et al., Advances in the delivery of RNA therapeutics: from concept to clinical reality, Genome Medicine 9:60 (2017).

[0152] In some embodiments, the mRNA is produced by in vitro transcription. In some embodiments, the mRNA is modified to optimize its activity. In some embodiments, the mRNA comprises a modified base, a 5′ cap, a 5′ cap analogue, an anti-reverse cap analog (ARCA), or a combination thereof.

[0153] In some embodiments, the mRNA comprises a poly(A) tail. In some embodiments, the poly(A) tail is about 100-200 nucleotides. In some embodiments, the poly(A) tail improves the expression and/or stability of the mRNA (see, e.g., Kaczmarek et al., Genome Medicine 9:60 (2017)).

[0154] In some embodiments, the mRNA comprises 5′ cap. In some embodiments, the mRNA comprises a 5′ cap analogue. In some embodiments, the 5′ cap analogue is a 1,2-dithiodiphosphate-modified cap (see, e.g., Strenkowska et al., Nucleic Acids Res. 44:9578-90 (2016)).

[0155] In some embodiments, the mRNA comprises a modified 3′ untranslated region (UTR), a 5′ UTR, or both. In some embodiments, the modified UTR comprises sequences responsible for recruiting RNA-binding proteins (RBPs) and miRNAs (e.g., to enhance the level of protein product (see, e.g., Kaczmarek et al., Genome Medicine 9:60 (2017)). In some embodiments, the 3′ UTR, 5′ UTR, or both are modified to encode a regulatory element. In some embodiments, the regulatory element comprises a K-turn motif, a miRNA binding site, or a combination thereof to control RNA expression in a cell-specific manner (see, e.g., Wroblewska et al., Nat Biotechnol. 33:839-41 (2015)).

[0156] In some embodiments, the mRNA comprises an RNA base modification. In some embodiments, the mRNA comprises a pseudouridine. In some embodiments, the mRNA comprises a N1-methyl-pseudouridine (e.g., to mask immune-stimulatory activity and enhance translation initiation (see, e.g., Andries et al., J Control Release 217:337-44 (2015) and Svitkin et al., Nucleic Acids Res. 45:6023-36 (2017)).

[0157] In some embodiments, the RNA (e.g., mRNA) is a circular RNA.

[0158] Compositions and methods for producing mRNA are disclosed, see, e.g., in WO2016011306, WO2016014846, WO2016022914, WO2016077123, WO2016164762, WO2016201377, WO2017049275, U.S. Pat. Nos. 9,937,233, 8,710,200, U.S. Ser. No. 10/022,425, U.S. Pat. Nos. 9,878,056, 9,572,897, WO2010084371, U.S. Pat. No. 9,353,153, WO2015034925 and WO2019236673. Also see, e.g., Jemielity et al., RNA 9(9):1108-22 (2003); Mockey et al., Biochem Biophys Res Commun. 340: 1062-88 (2006); Strenkowska et al. Nucleic Acids Res. 44: 9578-90 (2016); Presnyak et al., Cell 160: 1111-24 (2015) and Kaczmarek et al., Genome Medicine 9:60 (2017)). In some embodiments, the mRNA is prepared in a lipid nanoparticle (LNP) formulation (e.g., for in vivo delivery, see, e.g., U.S. Pat. Nos. 9,764,036, 9,682,139, Kauffman et al., Nano Lett. 15: 7300-6 (2015) and Fenton et al., Adv Mater. 28: 2939-43 (2016)).

[0159] In some embodiments, the polynucleotide is an aptamer. In certain embodiments, the aptamer binds to a target protein disclosed herein. In particular embodiments, the aptamer binds to a binding partner of a target protein disclosed herein.

[0160] In some embodiments, the polynucleotide is linked (e.g., covalently) to a delivery polymer. In some embodiments, the link between the polynucleotide and the delivery polymer is reversible. In some embodiments, the polynucleotide is linked to the delivery polymer via a physiologically labile linker. In some embodiments, the physiologically labile linker is a disulfide bond.

[0161] In some embodiments, the polynucleotide is conjugated to the polymer in the presence of an excess of polymer. In some embodiments, the excess polymer is removed prior to administration (e.g., to a cell or a subject).

[0162] A person of ordinary skill in the art can readily make suitable polynucleotide agents for use in the compositions, kits and methods described herein using the gene locus information of the protein sequences contained in the Sequence Listing incorporated herein, such as the chromosomal location, starting and ending nucleotide positions, and polymorphism identifications.

### C. Agents Comprising Gene Editing Systems

[0163] In some embodiments, the agent comprises a gene editing system. In some embodiments, the gene editing system produces a deletion of nucleotides, a substitution of nucleotides, an addition of nucleotides or a combination of the foregoing, in a gene encoding a target protein.

[0164] In some embodiments, the gene editing system is a CRISPR/Cas system, a transposon-based gene editing system, or a transcription activator-like effector nuclease (TALEN) system. In some embodiments, the gene editing system is a CRISPR/Cas system. In some embodiments, the gene editing system is a class II CRISPR/Cas system.

[0165] In some embodiments, the gene editing system (e.g., the CRISPR/Cas system) reduces (e.g., decreases, inhibits) or eliminates (e.g., via gene knockout) the expression of the target protein. In some embodiments, the gene editing system (e.g., the CRISPR/Cas system) reduces (e.g., decreases, inhibits) or eliminates (e.g., via gene knockout) the expression of a protein capable of modulating the expression or activity of the target protein. In some embodiments, the gene editing system (e.g., the CRISPR/Cas system) increases (e.g., via gene knock-in or gene replacement) the expression of the target protein. In some embodiments, the gene editing system (e.g., the CRISPR/Cas system) increases (e.g., via gene knock-in or gene replacement) the expression of a protein capable of modulating the expression or activity of the target protein.

[0166] In some embodiments, the CRISPR system specifically catalyzes cleavage in a gene encoding the target protein, thereby inactivating said gene. Repairing nucleic acid strand breaks through non-homologous end joining (NHEJ) often results in changes to the DNA sequence at the site of the cleavage, resulting in small insertions or deletions (Indels). In some embodiments, NHEJ is used to knock out the gene encoding the target protein. In some embodiments, homology directed repair (HDR) is used to concurrently inactivate a gene encoding the target protein and insert a heterologous sequence into the inactivated locus. Cells in which a knockout and/or knockin event has occurred can be identified and/or selected by well-known methods in the art.

[0167] In some embodiments, the gene editing system comprises a single Cas endonuclease or a polynucleotide encoding the single Cas endonuclease. In some embodiments, the single Cas endonuclease is Cas9, Cpf1, C2C1 or C2C3. In some embodiments, the single Cas endonuclease is Cas9 (e.g., of Streptococcus Pyogenes). In some embodiments, the single Cas endonuclease is Cpf1. In some embodiments, the Cpf1 is AsCpf1 (from Acidaminococcus sp.) or LbCpf1 (from Lachnospiraceae sp.). The choice of nuclease and gRNA(s) will typically be determined according to whether a deletion, a substitution, or an addition of nucleotide(s) to a targeted sequence is desired.

[0168] In some embodiments, the type II Cas endonuclease is Cas 9 (e.g., of Streptococcus pyogenes). In some embodiments, the modified Cas 9 is nickase Cas9, dead Cas9 (dCas9) or eSpCas9. In some embodiments, the nickase Cas9 is Cas9 D10A. In some embodiments, the dCas9 is D10A or H840A. In some embodiments, the gene editing system comprises a double nickase Cas9 (e.g., to achieve more accurate genome editing, see, e.g., Ran et al., Cell 154: 1380-89 (2013). Wild-type Cas9 generates double-strand breaks (DSBs) at specific DNA sequences targeted by a gRNA. Nickase Cas9 generates only a single-strand break. dCas9 is catalytically inactive. In some embodiments, dCas9 is fused to a nuclease (e.g., a FokI to generate DSBs at target sequences homologous to two gRNAs). Various CRISPR/Cas9 plasmids are publicly available from the Addgene repository (Addgene, Cambridge, MA: addgene.org/crispr/).

[0169] In some embodiments, the gene editing system comprises:
[0170] a) a wild-type or modified type II Cas endonuclease or a polynucleotide encoding the wild-type or modified type II Cas endonuclease;
[0171] b) a CRISPR RNA (“crRNA”); and
[0172] c) a trans-activating crRNA (“tracrRNA”).

[0173] In some embodiments, the crRNA comprises at least 1 “guide RNA” (sgRNA), e.g., at least: 2, 3 or 4 gRNAs. In some embodiments, the gRNA comprises a sequence that is identical to a portion of the gene sequence of the target protein. In some embodiments, the gRNA comprises a sequence that is identical to a portion of the gene sequence of a protein capable of modulating the expression or activity of the target protein. In some embodiments, the gRNA is at least about 16 nucleotides, e.g., at least about: 17, 18, 19, 20, 21, 22, 23, 24 or 25 nucleotides; or about: 16, 17, 18, 19, 20, 21, 22, 23, 24 or 25 nucleotides; or about: 16-24, 17-24, 17-23, 18-23, 18-22, 19-22 or 19-21 or 19, 20 or 21 nucleotides. In some embodiments, the sgRNA is chemically modified.

[0174] Design of gRNA sequences for gene editing are known in the art. See, for example, Cong et al., Science, 339: 819-23 (2013) and Ran et al., Nature Protocols 8: 2281-308 (2013). Cas9 requires at least about 16 or 17 nucleotides of gRNA sequence to cleave DNA, and Cpf1 requires at least about 16 nucleotides of gRNA sequence to cleave DNA. In practice, a gRNA sequence has a length of about 17-24 nucleotides (e.g., about: 19, 20 or 21 nucleotides) and is complementary to a target gene. Custom gRNA generators and algorithms are commercially available. Chemically modified sgRNAs have also been demonstrated to be effective in genome editing (see, e.g., Hendel et al., Nature Biotechnol., 985-91 (2015)).

[0175] In some embodiments, the crRNA further comprises a sequence capable of binding to the tracrRNA. Upon binding, the partially double-stranded structure is cleaved by RNase III, the resulting crRNA/tracrRNA hybrid directs the Cas9 endonuclease to recognize and cleave a target DNA sequence.

[0176] In some embodiments, the target DNA sequence is approximate to a “protospacer adjacent motif” (“PAM”) that is specific for a Cas endonuclease. PAM sequences appear throughout a given genome. CRISPR endonucleases of various prokaryotic species have unique PAM sequence requirements. Non-limiting examples of PAM sequences include: 5′-NGG (Streptococcus pyogenes), 5′-NNAGAA (Streptococcus thermophilus CRISPR1), 5′-NGGNG (Streptococcus thermophilus CRISPR3) and 5′-NNNGATT (Neisseria meningiditis). Some endonucleases, e.g., Cas9 endonucleases, are associated with G-rich PAM sites, e.g., 5′-NGG, and perform blunt-end cleaving of the target DNA at a location that is 3 nucleotides upstream (5′) of the PAM site.

[0177] In some embodiments, the gene editing system comprises:
[0178] a) a wild-type or modified type II Cas endonuclease or a polynucleotide encoding the wild-type or modified type II Cas endonuclease; and
[0179] b) a crRNA.

[0180] Cpf1-associated CRISPR arrays are processed into mature crRNAs without the requirement of a tracrRNA. Cpf1 endonucleases, are associated with T-rich PAM sites, e.g., 5′-TTN. Cpf1 can also recognize a 5′-CTA PAM motif. Cpf1 cleaves the target DNA by introducing an offset or staggered double-strand break with a 4- or 5-nucleotide 5′ overhang, for example, cleaving a target DNA with a 5-nucleotide offset or staggered cut located 18 nucleotides downstream (3′) of the PAM site on the coding strand and 23 nucleotides downstream from the PAM site on the complimentary strand. The 5-nucleotide overhang that results from such offset cleavage allows more precise genome editing by DNA insertion by homologous recombination than by insertion at blunt-end cleaved DNA. See, e.g., Zetsche et al., Cell 163:759-71 (2015).

[0181] In some embodiments, the gene editing system activates or represses transcription of a target gene. In some embodiments, the gene editing system comprises:
[0182] a) a chimeric protein comprising dCas9 and one or more effector domains; and
[0183] b) one or more sgRNAs.

[0184] In some embodiments, the chimeric protein represses the expression of the target protein (CRISPRi). In some embodiments, the chimeric protein activates the expression of the target protein (CRISPRa). In some embodiments, the chimeric protein methylates a DNA sequence recognized by the sgRNA. In some embodiments, the chimeric protein demethylates a DNA sequence recognized by the sgRNA.

[0185] An effector domain comprises a biologically active portion of an effector protein (e.g., transcriptional activator or repressor). In some embodiments, the gene editing system comprises 1 effector domain. In some embodiments, the gene editing system comprises at least 2 effector domains, e.g., 2, 3 or 4 effector domains. In some embodiments, the effector domain comprises KRAB. In some embodiments, the effector domain comprises VP64. In some embodiments, the effector domain comprises VP64, p65 and Rta. In some embodiments, the dCas9 is D10A. In some embodiments, the dCas9 is H840A.

[0186] Because dCas9 is catalytically inactive, dCas9 does not cut the target DNA but interferes with transcription by steric hindrance. The dCas9 chimeric protein (e.g., dCas9-VPR), guided by the one or more gRNAs to the upstream sequence of a transcriptional start site (TSS) of the target gene, modulates transcription of the target gene. See, e.g., Gilbert et al., CRISPR-Mediated Modular RNA-Guided Regulation of Transcription in Eukaryotes, Cell 154, 442-51 (2013); Cheng et al., Multiplexed activation of endogenous genes by CRISPR-on, an RNA-guided transcriptional activator system, Cell Res. 23: 1163-71 (2013); Gilbert et al., Genome-Scale CRISPR-Mediated Control of Gene Repression and Activation, Cell 159: 647-61 (2014); Tanenbaum et al., A protein-tagging system for signal amplification in gene expression and fluorescence imaging, Cell 159: 635-46 (2014); Konermann et al., Genome-scale transcriptional activation by an engineered CRISPR-Cas9 complex, Nature 517: 583-88 (2015); Chavez et al., Highly efficient Cas9-mediated transcriptional programming, Nat. Methods. 12: 326-28 (2015); Zalatan et al., Engineering complex synthetic transcriptional programs with CRISPR RNA scaffolds, Cell 160: 339-50 (2015); Horlbeck et al., Compact and highly active next-generation libraries for CRISPR-mediated gene repression and activation, eLife. 5: e19760 (2016); Chavez et al., Comparison of Cas9 activators in multiple species, Nat Methods. 7: 563-67 (2016).

[0187] CRISPR technology for editing the genes of eukaryotes is disclosed in US Patent Application Publications 2016/0138008A1 and US2015/0344912A1, and in U.S. Pat. Nos. 8,697,359, 8,771,945, 8,945,839, 8,999,641, 8,993,233, 8,895,308, 8,865,406, 8,889,418, 8,871,445, 8,889,356, 8,932,814, 8,795,965, and 8,906,616. Cpf1 endonuclease and corresponding guide RNAs and PAM sites are disclosed in US Patent Application Publication 2016/0208243 A1. CRISPR technology for generating mtDNA dysfunction in the mitochondrial genome is disclosed in Jo et al., BioMed Res. Int. 2015: 305716 (2015). Co-delivery of Cas9 and sgRNA with nanoparticles is disclosed in Mout et al., ACS Nano 11(3): 2452-58 (2017).

[0188] In some embodiments, the agent comprises a transposon-based gene editing system. An example of a suitable transposon-based gene editing system for use in the disclosure provided herein is the Gene Writer system described in International Publication Number WO 2020/047124, published on Mar. 5, 2020, the contents of which are incorporated herein by referenced in their entirety.

[0189] In some embodiments, the agent comprises a transcription activator-like effector nuclease (TALEN) system. TALEN-based systems comprise a protein comprising a TAL effector DNA binding domain and an enzymatic domain. They are made by fusing a TAL effector DNA-binding domain to a DNA cleavage domain (a nuclease which cuts DNA strands). The FokI restriction enzyme described above is an exemplary enzymatic domain suitable for use in TALEN-based gene-regulating systems.

[0190] TAL effectors are proteins that are secreted by Xanthomonas bacteria via their type III secretion system when they infect plants. The DNA binding domain contains a repeated, highly conserved, 33-34 amino acid sequence with divergent 12th and 13th amino acids. These two positions, referred to as the Repeat Variable Diresidue (RVD), are highly variable and strongly correlated with specific nucleotide recognition. Therefore, the TAL effector domains can be engineered to bind specific target DNA sequences by selecting a combination of repeat segments containing the appropriate RVDs. The nucleic acid specificity for RVD combinations is as follows: HD targets cytosine, NI targets adenine, NG targets thymine, and NN targets guanine (though, in some embodiments, NN can also bind adenine with lower specificity)

[0191] In some embodiments, the TAL effector domains bind to a target DNA sequence that is at least 90%, 95%, 96%, 97%, 98%, or 99% identical, or is 100% identical to a target DNA sequence of the target protein. In some embodiments, the TAL effector domains bind to a target DNA sequence that is at least 90%, 95%, 96%, 97%, 98%, or 99% identical, or is 100% identical to a target DNA sequence defined by a set of genomic coordinates.

[0192] In some embodiments, the gene-regulating system comprises two or more TAL effector-fusion proteins each comprising a TAL effector domain, wherein at least one of the TAL effector domains binds to a target DNA sequence of the target protein. In some embodiments, at least one of the two or more TAL effector domains binds to a target DNA sequence that is at least 90%, 95%, 96%, 97%, 98%, or 99% identical, or is 100% identical to a target DNA sequence defined by a set of genomic coordinates.

[0193] Methods and compositions for assembling the TAL-effector repeats are known in the art. See e.g., Cermak et al, Efficient design and assembly of custom TALEN and other TAL effector-based constructs for DNA targeting, Nucleic Acids Res 39(12): e82 (2011). Plasmids for constructions of the TAL-effector repeats are commercially available from e.g., Addgene.

[0194] In some embodiments, the agent comprises a zinc finger nuclease (ZFN) system. ZFN domains can be generated using commercially available plasmids, such as, for example, plasmid pairs (CSTZFN-1KT COMPOZR® Custom Zinc Finger Nuclease (ZFN) R-3257609) from Sigma Aldrich (St. Louis, MO). Plasmids can be prepared using the commercial system following manufacturer's protocol (e.g., NEB Monarch Miniprep (Cat #T1010), New England Biolabs, Ipswich, MA).

[0195] In some embodiments, the agent comprises a vector designed for delivering conventional gene therapy (e.g., gene knockout or knock-in via homologous recombination). Non-limiting examples of said vectors include retrovirus (e.g., Lentivirus 5), adenovirus, adeno-associated virus, Herpes Simplex Virus, nanoparticles and DNA Transposons.

### c) Small Molecule Agents

[0196] In some embodiments, the agent comprises a small molecule. In some embodiments, the small molecule binds to the target protein. In some embodiments, the small molecule binds to a protein capable of modulating the expression or activity of the target protein. In some embodiments, the small molecule is an inhibitor of the target protein (e.g., a direct inhibitor, an indirect inhibitor). In some embodiments, the small molecule is an activator of the target protein (e.g., a direct activator, and indirect activator).

[0197] Examples of small molecules include organic compounds, organometallic compounds, inorganic compounds, and salts of organic, organometallic or inorganic compounds. Atoms in a small molecule are typically linked together via covalent and/or ionic bonds. In certain embodiments, the small molecule is a small organic molecule. The arrangement of atoms in a small organic molecule may represent a chain (e.g. a carbon-carbon chain or a carbon-heteroatom chain), or may represent a ring containing carbon atoms, e.g. benzene or a polycyclic system, or a combination of carbon and heteroatoms, i.e., heterocycles such as a pyrimidine or quinazoline. Although small molecules can have a wide range of molecular weights, they generally include molecules that are less than about 5,000 daltons. For example, such small molecules can be less than about 1000 daltons and, preferably, are less than about 750 daltons or, more preferably, are less than about 500 daltons. Small molecules can be found in nature (e.g., identified, isolated, purified) and/or produced synthetically (e.g., by traditional organic synthesis, bio-mediated synthesis, or a combination thereof). See e.g. Ganesan, Drug Discov. Today 7(1): 47-55 (January 2002); Lou, Drug Discov. Today, 6(24): 1288-1294 (December 2001). Examples of naturally occurring small molecules include, but are not limited to, hormones, neurotransmitters, nucleotides, amino acids, sugars, lipids, and their derivatives.

[0198] In particular embodiments, the agent comprises a proteolysis targeting chimera (PROTAC).

[0199] A small molecule suitable for use in the compositions, kits and methods of this disclosure can be identified by a person of ordinary skill in the art using any of the screening methods disclosed herein.

### d) Therapeutic Cells and Cell-Based Therapies

[0200] In some embodiments, the agent comprises a therapeutic cell. In certain embodiments, the therapeutic cell expresses and/or is engineered to express a target protein (e.g., a target protein in the Sequence Listing or a variant thereof), a polypeptide (e.g., an antibody, an antigen-binding fragment or a polypeptide that comprises an amino acid sequence that is at least 70% identical to at least a portion of the target protein), a polynucleotide (e.g., a recombinant DNA, an RNA such as mRNA or siRNA), and/or a gene editing system (e.g., a CRISPR/Cas system) described herein.

[0201] In some embodiments, a polypeptide disclosed herein (e.g., an antibody or antigen-binding fragment) is incorporated into a cell-based therapy. In some embodiments, the polypeptide is an engineered T cell receptor. In some embodiments, the polypeptide is a chimeric antigen receptor (CAR) (e.g., expressed on a T (CAR-T) cell, natural killer (CAR-NK) cell, or macrophage (CAR-M) cell). In some embodiments, the CAR comprises a transmembrane domain and an antigen-recognition moiety, wherein the antigen-recognition moiety binds the target protein. In certain embodiments, the polypeptide is expressed by a therapeutic cell (e.g., a CAR-T, CAR-NK or CAR-M cell). In particular embodiments, the polypeptide is a cytokine receptor expressed on the membrane of a CAR-T, CAR-NK or CAR-M cell. In more particular embodiments, the polypeptide is a cytokine secreted from a CAR-T, CAR-NK or CAR-M cell.

[0202] A therapeutic cell suitable for use in the compositions, kits and methods of this disclosure can be generated, identified and/or enriched with methods known to a person of ordinary skill in the art. Non-limiting examples of said methods include purifying, propagating and/or differentiating cells from a subject (e.g., a human) to a specific cell product; engineering a somatic cell for gene therapy; cell immortalization; ex vivo gene modification of a cell (e.g., using viral vector and/or lipid nanoparticle delivery technologies); in vivo gene modification of a cell (e.g., using viral vector and/or lipid nanoparticle delivery technologies); genome editing; cell plasticity technologies; gene modifications; and flow cytometry. In some embodiments, the therapeutic cell is autologous or syngeneic. In other embodiments, the therapeutic cell is allogeneic.

### Expression Vectors and Hosts

[0203] In another aspect, the disclosure provides an expression vector comprising a polynucleotide described herein.

[0204] The term “expression vector” refers to a replicable nucleic acid from which one or more proteins can be expressed when the expression vector is transformed into a suitable expression host cell.

[0205] In some embodiments, the expression vector comprises an expression control polynucleotide sequence operably linked to the polynucleotide, a polynucleotide sequence encoding a selectable marker, or both. In some embodiments, the expression control polynucleotide sequence comprises a promoter sequence, an enhancer sequence, or both. In some embodiments, the expression control polynucleotide sequence comprises an inducible promoter sequence. The term “promoter” refers to a region of DNA to which RNA polymerase binds and initiates the transcription of a gene. The term “operably linked” means that the nucleic acid is positioned in the recombinant polynucleotide, e.g., vector, in such a way that enables expression of the nucleic acid under control of the element (e.g., promoter) to which it is linked. The term “selectable marker element” is an element that confers a trait suitable for artificial selection. Selectable marker elements can be negative or positive selection markers. Non-limiting examples of expression vectors for use with bacterial, fungal, yeast, and mammalian cellular hosts are described in Molecular Cloning: A Laboratory Manual (Michael R. Green & Joseph Sambrook eds., 4th ed. 2012).

[0206] In another aspect, the disclosure provides an expression host cell comprising any one or more of the polynucleotides or expression vectors described herein.

[0207] The term “expression host cell” refers to a cell useful for receiving, maintaining, reproducing and/or amplifying a vector.

[0208] Non-limiting examples of expression host cells include mammalian cells such as hybridoma cells, Baby Hamster Kidney fibroblasts (BHK cells), Chinese hamster ovary (CHO) cells, COS cells, HeLa cells, and human embryonic kidney (HEK), yeast cells such as Pichia pastoris cells, or bacterial cells such as DH5α, etc. See, e.g., Mammalian Cell Cultures for Biologics Manufacturing (Weichang Zhou & Anne Kantardjieff eds., 2014) for processes of host cell culture for production of protein therapeutics; Protein Biotechnology: Isolation, Characterization, and Stabilization (Felix Franks eds., 2013) and Protein Purification Protocols (Paul Cutler eds., 2010) for purification of protein therapeutics; and Therapeutic Protein Drug Products: Practical Approaches to formulation in the Laboratory, Manufacturing, and the Clinic (Brian K Meyer eds., 2012) for formulation of protein therapeutics.

[0209] A polynucleotide or expression vector described herein can be introduced into a suitable or desired host cell using techniques known in the art, including transformation, electroporation, and transduction. The introduced nucleic acid can be extrachromosomal in the host cell, or integrated into the host cell's genome.

### Pharmaceutical Compositions

[0210] In another aspect, the disclosure provides a pharmaceutical composition, wherein the pharmaceutical composition comprises an agent disclosed herein, and a pharmaceutically acceptable carrier. As used herein, the term “pharmaceutical composition” refers to a composition having pharmacological activity or other direct effect in mitigating, treating, or preventing cancer, or a finished dosage form or formulation thereof.

[0211] In some embodiments, the composition (e.g., pharmaceutical composition) comprises pharmaceutically acceptable carriers, excipients, stabilizers, diluents or tonifiers (Remington's Pharmaceutical Sciences 16th edition, Osol, A. Ed. (1980)). Suitable pharmaceutically acceptable carriers, excipients, or stabilizers are nontoxic to recipients at the dosages and concentrations employed. Non-limiting examples of pharmaceutically acceptable carriers, excipients, stabilizers, diluents or tonifiers include buffers (e.g., phosphate, citrate, histidine), antioxidants (e.g., ascorbic acid or methionine), preservatives, proteins (e.g., serum albumin, gelatin or immunoglobulins); hydrophilic polymers, amino acids, carbohydrates (e.g., monosaccharides, disaccharides, glucose, mannose or dextrins); chelating agents (e.g., EDTA), sugars (e.g., sucrose, mannitol, trehalose or sorbitol), salt-forming counter-ions (e.g., sodium), metal complexes (e.g., Zn-protein complexes); non-ionic surfactants (e.g., Tween), PLURONICS™ and polyethylene glycol (PEG).

[0212] In some embodiments, the agent of the pharmaceutical compositions (e.g., polypeptide, polynucleotide, or small molecule) is modified, e.g., conjugated to a heterologous moiety. The term “conjugated” refers to attached, via a covalent or noncovalent interaction. Conjugation can employ any of suitable linking agents; non-limiting examples include peptide linkers, compound linkers, and chemical cross-linking agents.

[0213] In some embodiments, the heterologous moiety is a marker (e.g., a fluorescent or radioactive marker), a molecule that stabilizes the agent, a molecule that targets the agent (e.g., to a particular cell or tissue, to facilitate or prevent from crossing the blood brain barrier), or a combination thereof.

[0214] In some embodiments, the heterologous moiety is polyethylene glycol (PEG), hexadecanoic acid, hydrogels, nanoparticles, multimerization domains and carrier peptides. In some embodiments, the nanoparticle is a lipid nanoparticle. In some embodiments, the nanoparticle is a polymer nanoparticle. In some embodiments, the polymer is an amphiphilic polymer. In other embodiments, the polymer is a hydrophobic or hydrophilic polymer. Non-limiting examples of polymers include poly(lactic acid)-poly(ethylene glycol), poly(lactic-co-glycolic acid)-poly(ethylene glycol), poly(lactic-co-glycolic) acid (PLGA), poly(lactic-co-glycolic acid)-d-α-tocopheryl polyethylene glycol succinate, poly(lactic-co-glycolic acid)-ethylene oxide fumarate, poly(glycolic acid)-poly(ethylene glycol), polycaprolactone-poly(ethylene glycol), or any salts thereof. In some embodiments, the polymer nanoparticle comprises poly(lactic-co-glycolic) acid (PLGA).

[0215] In some embodiments, the composition (e.g., pharmaceutical composition) is formulated for a suitable administration schedule and route. Non-limiting examples of administration routes include oral, rectal, mucosal, intravenous, intramuscular, subcutaneous and topical, etc. In some embodiments, the composition (e.g., pharmaceutical composition) is stored in the form of an aqueous solution or a dried formulation (e.g., lyophilized). In some embodiments, the composition is formulated to be administered by infusion (e.g., intravenous infusion).

[0216] In some embodiments, the composition is formulated to be administered with one or more additional therapeutic agents (e.g., with a second therapeutic agent) as a combination therapy. As used herein, a “combination therapy” or “administered in combination” means that two (or more) different agents or treatments are administered to a subject as part of a defined treatment regimen for a particular disease or condition. Non-limiting examples of additional agents or treatments include biologics (e.g., antibodies, peptides), cell therapies, gene therapies, immunotherapies, and small molecules impacting immune-mediated diseases or conditions.

[0217] The treatment regimen defines the doses and periodicity of administration of each agent such that the effects of the separate agents on the subject overlap. In some embodiments, the two or more agents are administered in a sequential manner as part of a prescribed regimen. In other embodiments, the delivery of the two or more agents is simultaneous or concurrent. In some embodiments, the two or more agents are co-formulated. In some embodiments, administration of two or more agents or treatments in combination is such that the reduction in a symptom, or other parameter related to the disorder is greater than what would be observed with one agent or treatment delivered alone or in the absence of the other. The effect of the two treatments can be partially additive, wholly additive, or greater than additive (e.g., synergistic). Each of the two or more therapeutic agents can be administered by any appropriate route including, but not limited to, oral routes, intravenous routes, intramuscular routes, and direct absorption through mucous membrane tissues. The two or more therapeutic agents can be administered by the same route or by different routes.

[0218] In some embodiments, the agent or pharmaceutical composition of the disclosure is delivered by a viral vector, e.g., by contacting a cell with a viral vector, locally administered (e.g., injected) to a tumor, or systemically (e.g., intravenously or orally) administered to a subject (e.g., a human patient).

[0219] Viral genomes provide a rich source of vectors that can be used for the efficient delivery of exogenous genes into a mammalian cell. Viral genomes are particularly useful vectors for gene delivery because the polynucleotides contained within such genomes are typically incorporated into the nuclear genome of a mammalian cell by generalized or specialized transduction. These processes occur as part of the natural viral replication cycle, and do not require added proteins or reagents to induce gene integration. Non-limiting examples of viral vectors include retrovirus (e.g., Retroviridae family viral vector), adenovirus (e.g., Ad5, Ad26, Ad34, Ad35, and Ad48), parvovirus (e.g., adeno-associated viruses), coronavirus, negative strand RNA viruses such as orthomyxovirus (e.g., influenza virus), rhabdovirus (e.g., rabies and vesicular stomatitis virus), paramyxovirus (e.g., measles and Sendai), positive strand RNA viruses, such as picornavirus and alphavirus, and double stranded DNA viruses including adenovirus, herpesvirus (e.g., Herpes Simplex virus types 1 and 2, Epstein-Barr virus, cytomegalovirus, replication deficient herpes virus), and poxvirus (e.g., vaccinia, modified vaccinia Ankara (MVA), fowlpox and canarypox). Additional non-limiting examples include Norwalk virus, togavirus, flavivirus, reoviruses, papovavirus, hepadnavirus, human papilloma virus, human foamy virus, and hepatitis virus, for example. Non-limiting examples of retroviruses include: avian leukosis-sarcoma, avian C-type viruses, mammalian C-type, B-type viruses, D-type viruses, oncoretroviruses, HTLV-BLV group, lentivirus, alpharetrovirus, gammaretrovirus, spumavirus (see, e.g., Coffin J M. Retroviridae: The viruses and their replication. In: Fields B N, Knipe D M, Howley P M et al, eds. Fundamental Virology. 3rd ed. Philadelphia: Lippincott-Raven Publishers, 1996:763-843). Additional non-limiting examples include murine leukemia viruses, murine sarcoma viruses, mouse mammary tumor virus, bovine leukemia virus, feline leukemia virus, feline sarcoma virus, avian leukemia virus, human T-cell leukemia virus, baboon endogenous virus, Gibbon ape leukemia virus, Mason Pfizer monkey virus, simian immunodeficiency virus, simian sarcoma virus, Rous sarcoma virus and lentiviruses. Additional non-limiting examples of vectors are described, for example, in U.S. Pat. No. 5,801,030, the teachings of which are incorporated herein by reference.

[0220] In some embodiments, the agent or pharmaceutical composition of the disclosure is formulated to be delivered by a membrane-based carrier in vivo, in vitro, ex vivo, or in situ. In some embodiments, the membrane-based carrier is a cell-based carrier (e.g., mammalian such as human cells). In some embodiments, the membrane-based carrier is a vesicle-based carrier. In some embodiments, the membrane-based carrier comprises one or more vectors described herein (e.g., a plasmid, virus, viral-like particle or a virosome).

[0221] In some embodiments, the agent or pharmaceutical composition of the disclosure is formulated to be delivered by one or more liposomes. Liposomes are spherical vesicle structures composed of a uni- or multilamellar lipid bilayer surrounding internal aqueous compartments and a relatively impermeable outer lipophilic phospholipid bilayer. Liposomes may be anionic, neutral or cationic. Liposomes are biocompatible, nontoxic, can deliver both hydrophilic and lipophilic drug molecules, protect their cargo from degradation by plasma enzymes, and transport their load across biological membranes and the blood brain barrier (BBB) (see, e.g., Spuch and Navarro, J Drug Deliv. 2011: 469679 (2011)).

[0222] Vesicles can be made from several different types of lipids; however, phospholipids are most commonly used to generate liposomes as drug carriers. Methods for preparation of multilamellar vesicle lipids are known in the art (see for example U.S. Pat. No. 6,693,086, the teachings of which relating to multilamellar vesicle lipid preparation are incorporated herein by reference). Although vesicle formation can be spontaneous when a lipid film is mixed with an aqueous solution, it can also be expedited by applying force in the form of shaking by using a homogenizer, sonicator, or an extrusion apparatus (see, e.g., Spuch and Navarro, J Drug Deliv. 2011: 469679 (2011)). Extruded lipids can be prepared by extruding through filters of decreasing size, as described in Templeton et al., Nature Biotech, 15: 647-52 (1997), the teachings of which relating to extruded lipid preparation are incorporated herein by reference.

[0223] In some embodiments, the agent or pharmaceutical composition of the disclosure is formulated to be delivered by lipid nanoparticles (LNPs). In one embodiment, the LNP preparation comprising the agent or pharmaceutical composition of the disclosure has one or more of the following characteristics: (a) the LNP preparation comprises a cationic lipid, a neutral lipid, a cholesterol, and a PEG lipid, (b) the LNP preparation has a mean particle size of between 80 nm and 160 nm.

[0224] Nanostructured lipid carriers (NLCs) are modified solid lipid nanoparticles (SLNs) that retain the characteristics of the SLN, improve drug stability and loading capacity, and prevent drug leakage. Polymer nanoparticles (PNPs) are an important component of drug delivery. These nanoparticles can effectively direct drug delivery to specific targets and improve drug stability and controlled drug release. Lipid-polymer nanoparticles (PLNs), a new type of carrier that combines liposomes and polymers, may also be employed. These nanoparticles possess the complementary advantages of PNPs and liposomes. A PLN is composed of a core-shell structure; the polymer core provides a stable structure, and the phospholipid shell offers good biocompatibility. As such, the two components increase the drug encapsulation efficiency rate, facilitate surface modification, and prevent leakage of water-soluble drugs. See, e.g., Li et al., Nanomaterials 7(6): 122 (2017).

[0225] In some embodiments, the agent or pharmaceutical composition of the disclosure is formulated to be delivered by a carbohydrate carrier (e.g., an anhydride-modified phytoglycogen or glycogen-type material). Non-limiting examples of carbohydrate carriers include phytoglycogen octenyl succinate, phytoglycogen beta-dextrin and anhydride-modified phytoglycogen beta-dextrin.

[0226] In some embodiments, the agent or pharmaceutical composition of the disclosure is formulated to be delivered by a protein carrier (e.g., a protein covalently linked to the circular polyribonucleotide). Non-limiting examples of protein carriers include human serum albumin (HSA), low-density lipoprotein (LDL), high-density lipoprotein (HDL) and globulin.

[0227] In some embodiments, the agent or pharmaceutical composition of the disclosure is formulated to be delivered by a cationic carrier (e.g., a cationic lipopolymer or transfection reagent). Non-limiting examples of cationic carriers include lipofectamine, polyethylenimine, poly(trimethylenimine), poly(tetramethylenimine), polypropylenimine, aminoglycoside-polyamine, dideoxy-diamino-b-cyclodextrin, spermine, spermidine, poly(2-dimethylamino)ethyl methacrylate, poly(lysine), poly(histidine), poly(arginine), cationized gelatin, dendrimers, chitosan, 1,2-Dioleoyl-3-Trimethylammonium-Propane (DOTAP), N-[1-(2,3-dioleoyloxy) propyl]-N,N,N-trimethylammonium chloride (DOTMA), 1-[2-(oleoyloxy)ethyl]-2-oleyl-3-(2-hydroxyethyl)imidazolinium chloride (DOTIM), 2,3-dioleyloxy-N-[2(sperminecarboxamido) ethyl]-N,N-dimethyl-l-propanaminium trifluoroacetate (DOSPA), 3B—[N—(N\N′-Dimethylaminoethane)-carbamoyl]Cholesterol Hydrochloride (DC-Cholesterol HCl), diheptadecylamidoglycyl spermidine (DOGS), N,N-distearyl-N,N-dimethylammonium bromide (DDAB), N-(1,2-dimyristyloxyprop-3-yl)-N,N-dimethyl-N-hydroxyethyl ammonium bromide (DMRIE) and N,N-dioleyl-N,N-dimethylammonium chloride (DODAC).

[0228] In some embodiments, the agent or pharmaceutical composition of the disclosure is formulated to be delivered by exosomes, adipocytes and/or red blood cells. See, e.g., Ha et al., Acta Pharm Sin B. 6(4): 287-96 (2016).

[0229] In some embodiments, the agent or pharmaceutical composition of the disclosure is formulated to be delivered by one or more Fusosomes. Fusosomes have been engineered to confer target cell specificity for the fusion and payload delivery, allowing the creation of delivery vehicles with programmable cell specificity. See, e.g., Patent Application WO2020014209, the teachings of which relating to fusosome design, preparation, and usage are incorporated herein by reference.

[0230] In some embodiments, the agent or pharmaceutical composition of the disclosure is formulated to be delivered by ex vivo differentiated red blood cells. See, e.g., WO2015073587; WO2017123646; WO2017123644; WO2018102740; WO2016183482; WO2015153102; WO2018151829; WO2018009838; Shi et al., PNAS, 111(28): 10131-36 (2014); U.S. Pat. No. 9,644,180; Huang et al., Nature Communications 8: 423 (2017).

[0231] In some embodiments, the agent or pharmaceutical composition of the disclosure is formulated to be delivered by one or more microsomes, virus-like particles (VLPs) or plant nanovesicles and plant messenger packs (PMPs). See, e.g., WO2011097480, WO2013070324, WO2017004526 and WO2020041784.

[0232] In some embodiments, the agent or pharmaceutical composition of the disclosure is formulated to be delivered by one or more anellosomes. The making and use of anellosomes used for delivery of therapeutic products is described in U.S. Pat. No. 11,166,996, the teachings of which relating to anellosome design, preparation, and usage are incorporated herein by reference.

### Methods of Modulating Target Proteins

[0233] In another aspect, the disclosure provides a method of modulating the expression or activity of a target protein identified in the Sequence Listing, or a variant thereof in a cell (a target cell, a cell of a target tissue), comprising contacting the cell (e.g., in vitro, ex vivo, or in vivo) with an agent that comprises and/or modulates the expression or activity of a target protein identified herein, or a pharmaceutical composition comprising the agent.

[0234] In some embodiments, the target cell is a cancer cell (e.g., a metastatic cancer cell), a cell (e.g., stromal cell) in a tumor micro-environment, or a combination thereof. In particular embodiments, the target cell is a metastatic cancer cell.

[0235] In some embodiments, the target cell is implicated and/or involved in inflammation. In certain embodiments, the target cell is an epithelial cell, an endothelial cell, a stem cell, a non-immune cell, or a combination thereof.

[0236] In some embodiments, the target cell is implicated and/or involved in fibrosis, aging, and/or senescence. In certain embodiments, the target cell is an epithelial cell, an endothelial cell, a stem cell, a non-immune cell, or a combination thereof.

[0237] In some embodiments, the target cell is an immune cell. In certain embodiments, the target cell is an effector T cell, a helper T cell, a Th1 cell, a Th2 cell, a Th17 cell, a B cell, a natural killer (NK) cell, an innate lymphoid cell (e.g., an ILC1 cell, an ILC2 cell, an ILC3 cell), a macrophage (e.g., an M1 macrophage, an M2 macrophage), a monocyte, and/or an antigen presenting cell (e.g., a dendritic cell), or a combination of the foregoing.

[0238] In some embodiments, a target protein of the disclosure is used to mediate depletion of a cell population (e.g., a population of cancer cells, such as tumor cells; a population of immune cells). In some embodiments, a target protein of the disclosure facilitates cell targeting (e.g., delivering a therapeutic in a cell type-specific manner), for example, as a binder of a surface marker.

[0239] The target tissue may be any tissue of the body.

[0240] In certain embodiments, the target tissue comprises a tumor, a tumor microenvironment, a site of metastasis, or a combination thereof.

[0241] In some embodiments, the target tissue is an immune tissue. In some embodiments, the target cell is a non-immune tissue. In some embodiments, the target tissue comprises a lymph node, a spleen, a secondary lymphoid organ, a tertiary lymphoid organ, a barrier tissue, skin, gut, an airway, a wound, an immune tissue, a non-immune tissue, or a combination of the foregoing.

[0242] In certain embodiments, the effective amount is sufficient to reduce expression of the target protein in the target cell and/or target tissue. In some embodiments, said reduction is by at least about 10%, e.g., by at least about: 15%, 20%, 25%, 30%, 35%, 40%, 45%, 50%, 55%, 60%, 65%, 70%, 75%, 80%, 85%, 90%, 91%, 92%, 93%, 94%, 95%, 96%, 97%, 98% or 99%. In particular embodiments, said reduction is about 10-99%, e.g., about: 10-98%, 15-98%, 15-97%, 20-97%, 20-96%, 25-96%, 25-95%, 30-95%, 30-94%, 35-94%, 35-93%, 40-93%, 40-92%, 45-92%, 45-91%, 50-91%, 50-90%, 55-90%, 55-85%, 60-85%, 60-80%, 65-80%, 65-75%, or 70-75%.

[0243] In certain embodiments, the effective amount is sufficient to increase expression of the target protein in the target cell and/or target tissue. In some embodiments, said increase is by at least about 10%, e.g., by at least about: 15%, 20%, 25%, 30%, 35%, 40%, 45%, 50%, 55%, 60%, 65%, 70%, 75%, 80%, 85%, 90%, 91%, 92%, 93%, 94%, 95%, 96%, 97%, 98% or 99%. In particular embodiments, said increase is about 10-99%, e.g., about: 10-98%, 15-98%, 15-97%, 20-97%, 20-96%, 25-96%, 25-95%, 30-95%, 30-94%, 35-94%, 35-93%, 40-93%, 40-92%, 45-92%, 45-91%, 50-91%, 50-90%, 55-90%, 55-85%, 60-85%, 60-80%, 65-80%, 65-75%, or 70-75%. In some embodiments, said increase is by about 1-100 fold, e.g., by about: 1-75, 1-50, 1-25, 1-20, 1-15, 1-10, 1-8, 1-6, 1-5, 1-4, 1-3 or 1-2 fold.

[0244] In some embodiments, the effective amount is sufficient to modulate nuclear factor kappa B (NF-κB) signaling, growth-factor signaling, cell death (e.g., apoptosis), cell cycle (e.g., mitosis), cell migration, inflammation, or a combination of the foregoing. In some embodiments, the effective amount is sufficient to modulate a signaling pathway involving the Janus kinase (JAK)-signal transducer family (e.g., JAK1, JAK2, JAK3 and TYK2), a member of the signal transducer and activator of transcription (STAT) protein family (e.g., STAT1, STAT3), a member of the protein kinase B family (e.g., RAC-alpha, RAC-beta or RAC-gamma serine/threonine-protein kinase), a member of the interferon regulatory factor (IRF) family, a mitogen-activated protein kinase (MAPK), or a combination of the foregoing.

### Methods of Diagnosis and Treatment

[0245] In another aspect, the disclosure provides a method of detecting a disease or condition, or predicting a likelihood of (or risk level for) developing a disease or condition in a subject, comprising quantifying an expression or activity of a target protein in a sample from the subject, wherein the level of expression or activity of the target protein in the sample is indicative of the likelihood of developing the disease or condition in the subject, wherein the disease or condition is selected from aging, senescence, fibrosis, autoimmunity, cancer (e.g., tumor), an immunological disease (e.g., inflammation and/or an autoimmune disease), or a combination thereof.

[0246] In another aspect, the disclosure provides a method of classifying a subject based on a predicted likelihood of developing a disease or condition, comprising quantifying an expression or activity of a target protein in a sample from the subject; predicting the likelihood of developing the disease or condition based on the expression or activity of the target protein in the sample; and classifying the patient based on the predicted likelihood, wherein the disease or condition is selected from inflammation, aging, senescence, fibrosis, autoimmunity, cancer (e.g., tumor), an immunological disease (e.g., a disease caused by dysregulation of the immune system), or a combination thereof. In certain embodiments, the disease or condition is or involves inflammation.

[0247] In another aspect, the disclosure provides a method of stratifying a set of subjects having a disease or condition, comprising: quantifying an expression and/or activity of a target protein in samples from individual subjects in the set; and stratifying the set of subjects for treatment according to the individual subjects' levels of the expression and/or activity of the target protein in the samples, wherein the disease or condition is selected from inflammation, aging, senescence, fibrosis, autoimmunity, cancer (e.g., tumor), an immunological disease (e.g., a disease caused by dysregulation of the immune system), or a combination thereof. In certain embodiments, the disease or condition is or involves inflammation.

[0248] In some embodiments, a higher expression or activity level of a target protein in a sample from the subject, relative to an appropriate control (e.g., reference standard) is indicative of the disease or condition or a likelihood of developing the disease or condition. In some embodiments, a lower expression or activity level of a target protein in a sample from the subject, relative to an appropriate control (e.g., reference standard) is indicative of the disease or condition or a likelihood of developing the disease or condition.

[0249] In some embodiments, the method further comprises administering to a subject who is determined to have or predicted to have a likelihood (or be at risk) of developing the disease or condition, an effective amount of an agent disclosed herein or a pharmaceutical composition disclosed herein.

[0250] In some embodiments, the method further comprises administering to a subject who is determined to have or predicted to have a likelihood of developing the disease or condition, an effective amount of an agent disclosed herein or a pharmaceutical composition disclosed herein.

[0251] In another aspect, the disclosure provides a method of preparing a sample that is useful for detecting a likelihood of developing the disease or condition in a subject, comprising:
[0252] a) obtaining or having obtained a sample from the subject;
[0253] b) adding a protease inhibitor, a control peptide, a standard peptide, or a combination thereof to the sample to prepare a sample that is useful for detecting a likelihood of developing cancer;
[0254] c) quantifying an expression or activity of a target protein in the sample prepared in step b); and
   wherein the disease or condition is selected from inflammation, aging, senescence, fibrosis, autoimmunity, cancer (e.g., tumor), an immunological disease (e.g., a disease caused by dysregulation of the immune system), or a combination thereof. In certain embodiments, the disease or condition is or involves inflammation.

[0255] In another aspect, the disclosure provides a method of treating a disease or condition in a subject in need thereof, comprising administering to the subject an effective amount of an agent disclosed herein or a pharmaceutical composition disclosed herein.

[0256] In another aspect, the disclosure provides a method of treating a disease or condition in a subject in need thereof, comprising administering to the subject an effective amount of an agent disclosed herein or a pharmaceutical composition disclosed herein, wherein the subject has an altered level of expression and/or activity of a target protein disclosed herein.

[0257] “Treatment” and “treating,” as used herein, refer to the medical management of a subject with the intent to improve, ameliorate, stabilize (i.e., not worsen), prevent or cure a disease, pathological condition, or disorder. “Treatment” includes active treatment (treatment directed to improve the disease, pathological condition, or disorder), causal treatment (treatment directed to the cause of the associated disease, pathological condition, or disorder), palliative treatment (treatment designed for the relief of symptoms), preventative treatment (treatment directed to minimizing or partially or completely inhibiting the development of the associated disease, pathological condition, or disorder); and supportive treatment (treatment employed to supplement another therapy). Treatment also includes diminishing the extent of the disease or condition; preventing spread of the disease or condition; delaying or slowing the progress of the disease or condition; ameliorating or palliating the disease or condition; and remission (whether partial or total), whether detectable or undetectable. “Ameliorating” or “palliating” a disease or condition means that the extent and/or undesirable clinical manifestations of the disease, disorder, or condition are lessened and/or time course of the progression is slowed or lengthened, as compared to the extent or time course in the absence of treatment. “Treatment” also includes prolonging survival as compared to expected survival if not receiving treatment. Those in need of treatment include those already with the condition or disorder, as well as those prone to have the condition or disorder or those in which the condition or disorder is to be prevented.

[0258] In some embodiments, the subject is an animal. In other embodiments the subject is a bird, e.g., a hen, rooster, turkey or parrot. In some embodiments, the subject is a mammal. In some embodiments the subject is a non-human mammal. Non-limiting examples of a non-human mammal include cattle (e.g., dairy or beef cattle), sheep, goat, pig, horse, dog, cat, mouse, rat, etc. In some embodiments, the subject is a human. In some embodiments, the human is a neonate. In some embodiments, the human is a pediatric patient. In some embodiments, the human is a juvenile. In some embodiments, the human is an adult. In some embodiments, the human is less than 18 years old. In some embodiments, the human is at least 18 years old. In some embodiments, the human is between 18 and 25 years old. In some embodiments, the human is at least 25 years old, e.g., at least 30, 35, 40, 45, 50, 55, 60, 65, 70, 75, or 80 years old.

[0259] As used herein, the term “effective amount,” “therapeutically effective amount,” or “sufficient amount” refers to a quantity sufficient to, when administered to a subject (e.g., a mammal such as a human cancer patient), effect treatment (e.g., produce beneficial or desired results), including effects at cellular, tissue or clinical levels, etc. As such, the term depends upon the context in which it is being applied. For example, in the context of treating cancer, it is an amount of an agent sufficient to achieve a response as compared to the response obtained without administration of the agent. The amount of a given composition described herein that will correspond to such an amount will vary depending upon various factors, such as the given agent, the pharmaceutical formulation, the route of administration, the type of disease or disorder, the identity of the subject (e.g., age, sex, weight) or host being treated, and the like, but can nevertheless be routinely determined by one skilled in the art. In some embodiments, a “therapeutically effective amount” of a composition of the present disclosure is an amount that results in a beneficial or desired result in a subject (e.g., as compared to a control). A therapeutically effective amount of a composition of the present disclosure may be readily determined by one of ordinary skill by routine methods known in the art. Dosage regimen may be adjusted to provide the optimum therapeutic response.

[0260] A therapeutic agent described herein can be administered via a variety of routes of administration, including, for example, oral, dietary, topical, transdermal, rectal, parenteral (e.g., intra-arterial, intravenous, intramuscular, subcutaneous injection, intradermal injection), intravenous infusion and inhalation (e.g., intrabronchial, intranasal or oral inhalation, intranasal drops) routes of administration, depending on the compound and the particular disease or condition to be treated. Administration can be local or systemic as indicated. The preferred mode of administration can vary depending on the particular compound chosen.

[0261] In some embodiments, the method further comprises administering a therapeutically effective amount of one or more additional therapeutic agents (e.g., a second therapeutic agent) to the subject.

[0262] Administration of two or more therapeutic agents encompasses co-administration of the therapeutic agents in a substantially simultaneous manner, such as in a pharmaceutical combination. Alternatively, such administration encompasses co-administration in multiple containers, or separate containers (e.g., capsules, powders, and liquids) for each therapeutic agent. Such administration also encompasses use of the therapeutic agents in a sequential manner, either at approximately the same time or at different times. When two or more therapeutic agents are administered, the therapeutic agents can be administered via the same administration route or via different administration routes.

[0263] In another aspect, the disclosure provides a method of modulating the expression or activity of a target protein identified in the Sequence Listing, or a variant thereof in a cell, comprising contacting the cell with an agent disclosed herein or a pharmaceutical composition disclosed herein. In some embodiments, the cell is in a subject.

[0264] In another aspect, the disclosure provides a method of identifying an agent that modulates the expression and/or activity of a target protein (e.g., a target protein in the Sequence Listing), comprising:
[0265] a) contacting a sample (e.g., a biological sample, such as cells or a tissue) comprising the target protein with an agent (e.g., a candidate agent to be tested for its ability to modulate expression and/or activity of the target); and
[0266] b) determining whether the agent modulates the expression or activity of the target protein,
[0267] wherein a difference in the expression or activity of the target protein that has been contacted with the agent compared to a reference indicates that the agent modulates the expression or activity of the target protein.

[0268] In some embodiments, a difference of at least about 10% in the expression or activity of the protein that has been contacted with the agent compared to the reference indicates that the agent modulates the expression or activity of the protein. In some embodiments, the difference is at least about: 15%, 20%, 25%, 30%, 35%, 40%, 45% or 50% or more.

[0269] In some embodiments, a decrease in the expression or activity of the target protein that has been contacted with the agent compared to the reference indicates the agent inhibits the expression or activity of the target protein. In some embodiments, an increase in the expression or activity of the protein compared to the reference indicates the agent activates the expression or activity of the protein.

### Indications

### e) Cancer

[0270] A wide variety of cancers is treatable according to the methods described herein. In some embodiments, the cancer comprises a solid tumor (e.g., a tumor of the breast, lung, prostate, colon, bladder, ovary, kidney, stomach, colon, rectum, testes, head and/or neck, pancreas, brain, skin). Accordingly, in some embodiments, the cancer is a solid tumor cancer. Solid tumor cancers that can be treated according to the methods described herein include breast cancer, lung cancer, prostate cancer, colon cancer, bladder cancer, ovarian cancer, renal cancer, gastric cancer, colon cancer, rectal cancer, colorectal cancer, testicular cancer, head and neck cancer, pancreatic cancer, brain cancer and skin cancer. In some embodiments, the cancer is a hematologic cancer (e.g., leukemia, lymphoma, myeloma). Hematologic cancers that can be treated according to the methods described herein include leukemias (e.g., acute leukemias, chronic leukemias), lymphomas (e.g., B-cell lymphoma, T-cell lymphoma) and multiple myeloma.

[0271] Examples of cancers treatable according to the methods described herein include Acute Lymphoblastic Leukemia (ALL); Acute Myeloid Leukemia (AML); Adrenocortical Carcinoma; Adrenocortical Carcinoma, Childhood; AIDS-Related Cancer (e.g., Kaposi Sarcoma, AIDS-Related Lymphoma, Primary CNS Lymphoma); Anal Cancer; Appendix Cancer; Astrocytomas, Childhood; Atypical Teratoid/Rhabdoid Tumor, Childhood, Central Nervous System; Basal Cell Carcinoma of the Skin; Bile Duct Cancer; Bladder Cancer; Bladder Cancer, Childhood; Bone Cancer (including Ewing Sarcoma, Osteosarcoma and Malignant Fibrous Histiocytoma); Brain Tumors/Cancer; Breast Cancer; Burkitt Lymphoma; Carcinoid Tumor (Gastrointestinal); Carcinoid Tumor, Childhood; Cardiac (Heart) Tumors, Childhood; Embryonal Tumors, Childhood; Germ Cell Tumor, Childhood; Primary CNS Lymphoma; Cervical Cancer; Childhood Cervical Cancer; Cholangiocarcinoma; Chordoma, Childhood; Chronic Lymphocytic Leukemia (CLL); Chronic Myelogenous Leukemia (CML); Chronic Myeloproliferative Neoplasms; Colorectal Cancer; Childhood Colorectal Cancer; Craniopharyngioma, Childhood; Cutaneous T-Cell Lymphoma (e.g., Mycosis Fungoides and Sézary Syndrome); Ductal Carcinoma In Situ (DCIS); Embryonal Tumors, Central Nervous System, Childhood; Endometrial Cancer (Uterine Cancer); Ependymoma, Childhood; Esophageal Cancer; Childhood Esophageal Cancer; Esthesioneuroblastoma; Ewing Sarcoma; Extracranial Germ Cell Tumor, Childhood; Extragonadal Germ Cell Tumor; Eye (Ocular) Cancer; Childhood Intraocular Melanoma; Intraocular Melanoma; Retinoblastoma; Fallopian Tube Cancer; Fibrous Histiocytoma of Bone, Malignant, and Osteosarcoma; Gallbladder Cancer; Gastric (Stomach) Cancer; Childhood Gastric (Stomach) Cancer; Gastrointestinal Carcinoid Tumor; Gastrointestinal Stromal Tumors (GIST); Childhood Gastrointestinal Stromal Tumors; Germ Cell Tumors; Childhood Central Nervous System Germ Cell Tumors (e.g., Childhood Extracranial Germ Cell Tumors, Extragonadal Germ Cell Tumors, Ovarian Germ Cell Tumors, Testicular Cancer); Gestational Trophoblastic Disease; Hairy Cell Leukemia; Head and Neck Cancer; Heart Tumors, Childhood; Hepatocellular (Liver) Cancer; Histiocytosis, Langerhans Cell; Hodgkin Lymphoma; Hypopharyngeal Cancer; Intraocular Melanoma; Childhood Intraocular Melanoma; Islet Cell Tumors, Pancreatic Neuroendocrine Tumors; Kaposi Sarcoma; Kidney (Renal Cell) Cancer; Langerhans Cell Histiocytosis; Laryngeal Cancer; Leukemia; Lip and Oral Cavity Cancer; Liver Cancer; Lung Cancer (Non-Small Cell and Small Cell); Childhood Lung Cancer; Lymphoma; Male Breast Cancer; Malignant Fibrous Histiocytoma of Bone and Osteosarcoma; Melanoma; Childhood Melanoma; Melanoma, Intraocular (Eye); Childhood Intraocular Melanoma; Merkel Cell Carcinoma; Mesothelioma, Malignant; Childhood Mesothelioma; Metastatic Cancer; Metastatic Squamous Neck Cancer with Occult Primary; Midline Tract Carcinoma With NUT Gene Changes; Mouth Cancer; Multiple Endocrine Neoplasia Syndromes; Multiple Myeloma/Plasma Cell Neoplasms; Mycosis Fungoides; Myelodysplastic Syndromes, Myelodysplastic/Myeloproliferative Neoplasms; Myelogenous Leukemia, Chronic (CML); Myeloid Leukemia, Acute (AML); Myeloproliferative Neoplasms, Chronic; Nasal Cavity and Paranasal Sinus Cancer; Nasopharyngeal Cancer; Neuroblastoma; Non-Hodgkin Lymphoma; Non-Small Cell Lung Cancer; Oral Cancer, Lip and Oral Cavity Cancer and Oropharyngeal Cancer; Osteosarcoma and Malignant Fibrous Histiocytoma of Bone; Ovarian Cancer; Childhood Ovarian Cancer; Pancreatic Cancer; Childhood Pancreatic Cancer; Pancreatic Neuroendocrine Tumors; Papillomatosis (Childhood Laryngeal); Paraganglioma; Childhood Paraganglioma; Paranasal Sinus and Nasal Cavity Cancer; Parathyroid Cancer; Penile Cancer; Pharyngeal Cancer; Pheochromocytoma; Childhood Pheochromocytoma; Pituitary Tumor; Plasma Cell Neoplasm/Multiple Myeloma; Pleuropulmonary Blastoma; Pregnancy and Breast Cancer; Primary Central Nervous System (CNS) Lymphoma; Primary Peritoneal Cancer; Prostate Cancer; Rectal Cancer; Recurrent Cancer; Renal Cell (Kidney) Cancer; Retinoblastoma; Rhabdomyosarcoma, Childhood; Salivary Gland Cancer; Sarcoma (e.g., Childhood Rhabdomyosarcoma, Childhood Vascular Tumors, Ewing Sarcoma, Kaposi Sarcoma, Osteosarcoma (Bone Cancer), Soft Tissue Sarcoma, Uterine Sarcoma); Sezary Syndrome; Skin Cancer; Childhood Skin Cancer; Small Cell Lung Cancer; Small Intestine Cancer; Soft Tissue Sarcoma; Squamous Cell Carcinoma of the Skin; Squamous Neck Cancer with Occult Primary, Metastatic; Stomach (Gastric) Cancer; Childhood Stomach (Gastric) Cancer; T-Cell Lymphoma, Cutaneous (e.g., Mycosis Fungoides and Sezary Syndrome); Testicular Cancer; Childhood Testicular Cancer; Throat Cancer (e.g., Nasopharyngeal Cancer, Oropharyngeal Cancer, Hypopharyngeal Cancer); Thymoma and Thymic Carcinoma; Thyroid Cancer; Transitional Cell Cancer of the Renal Pelvis and Ureter; Ureter and Renal Pelvis, Transitional Cell Cancer; Urethral Cancer; Uterine Cancer, Endometrial; Uterine Sarcoma; Vaginal Cancer; Childhood Vaginal Cancer; Vascular Tumors; Vulvar Cancer; and Wilms Tumor and Other Childhood Kidney Tumors.

[0272] Metastases of the aforementioned cancers can also be treated in accordance with the methods described herein. In some embodiments, the cancer is a metastatic cancer.

[0273] In some embodiments, the cancer is selected from lung cancer, breast cancer, Hodgkin's lymphoma, diffuse large B-cell lymphoma, follicular lymphoma, primary central nervous system lymphoma, chronic lymphocytic leukemia, epithelial ovarian cancer, prostate cancer, squamous cell carcinoma, non-melanoma skin cancer, nasal polyps, basal cell carcinoma, keratinocyte cancer, multiple myeloma, serous invasive ovarian cancer, hepatocellular carcinoma, small cell lung carcinoma, adenocarcinoma, lung adenocarcinoma, non-small cell lung cancer, ovarian cancer or colorectal cancer.

[0274] In some embodiments, the treatment:
[0275] a) inhibits cancer cell growth, proliferation, metastasis, invasion or migration, or a combination of the foregoing;
[0276] b) promotes cancer cell death;
[0277] c) induces cancer cell autophagy,
[0278] or a combination of the foregoing.

[0279] In some embodiments, the effective amount is sufficient to:
[0280] a) inhibit cancer cell growth, proliferation, metastasis, invasion or migration, or a combination of the foregoing;
[0281] b) promote cancer cell death;
[0282] c) induce cancer cell autophagy,
[0283] or a combination of the foregoing.

[0284] In some embodiments, the effective amount is sufficient to reduce cancer (e.g., tumor) growth, proliferation, metastasis, invasion, migration, autophagy or a combination of the foregoing. In certain embodiments, said reduction is by at least about 10%, e.g., by at least about: 15%, 20%, 25%, 30%, 35%, 40%, 45%, 50%, 55%, 60%, 65%, 70%, 75%, 80%, 85%, 90%, 91%, 92%, 93%, 94%, 95%, 96%, 97%, 98% or 99%. In particular embodiments, said reduction is about 10-99%, e.g., about: 10-98%, 15-98%, 15-97%, 20-97%, 20-96%, 25-96%, 25-95%, 30-95%, 30-94%, 35-94%, 35-93%, 40-93%, 40-92%, 45-92%, 45-91%, 50-91%, 50-90%, 55-90%, 55-85%, 60-85%, 60-80%, 65-80%, 65-75%, or 70-75%.

[0285] In some embodiments, the effective amount is sufficient to reduce cancer cell proliferation or tumor growth in the subject. In some embodiments, the reduction in cancer cell proliferation or tumor growth is by at least about 10%, e.g., by at least about: 15%, 20%, 25%, 30%, 35%, 40%, 45%, 50%, 55%, 60%, 65%, 70%, 75%, 80%, 85%, 90%, 91%, 92%, 93%, 94%, 95%, 96%, 97%, 98% or 99%. In some embodiments, the reduction in cancer cell proliferation or tumor growth is about 10-99%, e.g., about: 10-98%, 15-98%, 15-97%, 20-97%, 20-96%, 25-96%, 25-95%, 30-95%, 30-94%, 35-94%, 35-93%, 40-93%, 40-92%, 45-92%, 45-91%, 50-91%, 50-90%, 55-90%, 55-85%, 60-85%, 60-80%, 65-80%, 65-75%, or 70-75%.

[0286] In some embodiments, the effective amount is sufficient to modulate (e.g., increase or reduce) tumor autophagy, for example, by increasing at least one tumor-inhibiting function of autophagy and/or reducing at least one tumor-promoting function of autophagy.

[0287] In some embodiments, the effective amount is sufficient to increase cancer autophagy. In certain embodiments, said increase is by at least about 10%, e.g., by at least about: 15%, 20%, 25%, 30%, 35%, 40%, 45%, 50%, 55%, 60%, 65%, 70%, 75%, 80%, 85%, 90%, 91%, 92%, 93%, 94%, 95%, 96%, 97%, 98% or 99%. In particular embodiments, said increase is about 10-99%, e.g., about: 10-98%, 15-98%, 15-97%, 20-97%, 20-96%, 25-96%, 25-95%, 30-95%, 30-94%, 35-94%, 35-93%, 40-93%, 40-92%, 45-92%, 45-91%, 50-91%, 50-90%, 55-90%, 55-85%, 60-85%, 60-80%, 65-80%, 65-75%, or 70-75%.

[0288] In some embodiments, the effective amount is sufficient to reduce cancer autophagy. In certain embodiments, said reduction is by at least about 10%, e.g., by at least about: 15%, 20%, 25%, 30%, 35%, 40%, 45%, 50%, 55%, 60%, 65%, 70%, 75%, 80%, 85%, 90%, 91%, 92%, 93%, 94%, 95%, 96%, 97%, 98% or 99%. In particular embodiments, said reduction is about 10-99%, e.g., about: 10-98%, 15-98%, 15-97%, 20-97%, 20-96%, 25-96%, 25-95%, 30-95%, 30-94%, 35-94%, 35-93%, 40-93%, 40-92%, 45-92%, 45-91%, 50-91%, 50-90%, 55-90%, 55-85%, 60-85%, 60-80%, 65-80%, 65-75%, or 70-75%.

[0289] In some embodiments, the effective amount is sufficient to prevent death of a subject thereby reducing the cancer (e.g., tumor) death rate. In certain embodiments, the reduction in cancer (e.g., tumor) death rate is by at least about 10%, e.g., by at least about: 15%, 20%, 25%, 30%, 35%, 40%, 45%, 50%, 55%, 60%, 65%, 70%, 75%, 80%, 85%, 90%, 91%, 92%, 93%, 94%, 95%, 96%, 97%, 98% or 99%. In particular embodiments, the reduction in cancer (e.g., tumor) death rate is about 10-99%, e.g., about: 10-98%, 15-98%, 15-97%, 20-97%, 20-96%, 25-96%, 25-95%, 30-95%, 30-94%, 35-94%, 35-93%, 40-93%, 40-92%, 45-92%, 45-91%, 50-91%, 50-90%, 55-90%, 55-85%, 60-85%, 60-80%, 65-80%, 65-75%, or 70-75%.

[0290] In some embodiments, the effective amount is sufficient to modulate (e.g., increases or reduce) expression of the target protein in a cancer (e.g., tumor) cell.

[0291] In some embodiments, the effective amount is sufficient to modulate the body's response to cancer, for example, by inhibiting the growth of cancer, reducing malignancy of cancer, inhibiting metastasis of cancer, promoting remission, modulating (increasing and/or decreasing) immune-mediated responses related to cancer, or a combination of the foregoing.

### f) Immuno-Oncology

[0292] In some embodiments, the disclosure provides for treatments that leverage the immune system. In some embodiments, the methods relate to immuno-oncology (e.g., cancer immunotherapy). In still further embodiments, the immune system is the innate immune system. In some embodiments, the immune system is the adaptive immune system. In still further embodiments, the treatment relates to humoral immunity or antibody-mediated immunity. In some embodiments, the treatment relates to cell-mediated immunity, such as cancer. In some embodiments, the methods relate to treatment at or before early-stage disease progression, while in other embodiments, the methods relate to treatment at or prevention of late-stage disease progression. In still further embodiments, the immune-oncological effect results from stimulation of the immune system.

[0293] In some embodiments, the treatment modulates (e.g., increases) the subject's immune system against cancer.

[0294] In certain embodiments, the treatment modulates (e.g., increase or decrease): a) lymph node innervation;
[0295] b) the development of high endothelial venules (HEVs) and/or tertiary lymphoid organs (TLOs);
[0296] c) immune cell: migration, proliferation, recruitment, lymph node homing, lymph node egress, tumor homing, tumor egress, differentiation, activation, polarization, cytokine production, degranulation, maturation, antibody-dependent cellular cytotoxicity (ADCC), antibody-dependent cellular phagocytosis (ADCP), antigen presentation, target expression (e.g., protein or transcript), or a combination thereof, or a combination of the foregoing.

[0297] In some embodiments, the effective amount is sufficient to modulate (e.g., increase) the subject's immune system against cancer.

[0298] In certain embodiments, the effective amount is sufficient to modulate (e.g., increase or decrease):
[0299] a) lymph node innervation;
[0300] b) the development of HEVs and/or TLOs;
[0301] c) immune cell: migration, proliferation, recruitment, lymph node homing, lymph node egress, tumor homing, tumor egress, differentiation, activation, polarization, cytokine production, degranulation, maturation, ADCC, ADCP, antigen presentation, target expression (e.g., protein or transcript), or a combination thereof, or a combination of the foregoing.

[0302] In some embodiments, the modulation is an increase. In certain embodiments, said increase is by at least about 10%, e.g., by at least about: 15%, 20%, 25%, 30%, 35%, 40%, 45%, 50%, 55%, 60%, 65%, 70%, 75%, 80%, 85%, 90%, 91%, 92%, 93%, 94%, 95%, 96%, 97%, 98% or 99%. In particular embodiments, said increase is about 10-99%, e.g., about: 10-98%, 15-98%, 15-97%, 20-97%, 20-96%, 25-96%, 25-95%, 30-95%, 30-94%, 35-94%, 35-93%, 40-93%, 40-92%, 45-92%, 45-91%, 50-91%, 50-90%, 55-90%, 55-85%, 60-85%, 60-80%, 65-80%, 65-75%, or 70-75%.

[0303] In some embodiments, the modulation is a reduction. In certain embodiments, said reduction is by at least about 10%, e.g., by at least about: 15%, 20%, 25%, 30%, 35%, 40%, 45%, 50%, 55%, 60%, 65%, 70%, 75%, 80%, 85%, 90%, 91%, 92%, 93%, 94%, 95%, 96%, 97%, 98% or 99%. In particular embodiments, said reduction is about 10-99%, e.g., about: 10-98%, 15-98%, 15-97%, 20-97%, 20-96%, 25-96%, 25-95%, 30-95%, 30-94%, 35-94%, 35-93%, 40-93%, 40-92%, 45-92%, 45-91%, 50-91%, 50-90%, 55-90%, 55-85%, 60-85%, 60-80%, 65-80%, 65-75%, or 70-75%.

[0304] In some embodiments (e.g., immuno-oncology specific treatment), the effective amount is sufficient to modulate (e.g., increase or decrease) an immune cell-related readout, migration of an immune cell (e.g., an antigen presenting cell (such as a dendritic cell and/or a macrophage) and/or a T cell), proliferation of an immune cell, recruitment of an immune cell (e.g., an antigen presenting cell (such as a dendritic cell and/or a macrophage), a monocyte, a T cell, and/or a B cell), lymph node innervation, lymph node homing of an immune cell (e.g., a dendritic cell and/or a T cell), lymph node egress of an immune cell (e.g., a dendritic cell and/or a T cell), differentiation of an immune cell, activation of an immune cell, polarization of an immune cell, cytokine production (e.g., increase pro-inflammatory cytokine production, decrease pro-inflammatory cytokine production, increase anti-inflammatory cytokine production, decrease anti-inflammatory cytokine production), degranulation of an immune cell, maturation of an immune cell, ADCC of an immune cell, ADCP of an immune cell, antigen presentation, tumor homing of an immune cell (e.g. a T cell); increase tumor egress of an immune cell (e.g., a regulatory T cell) decrease tumor egress of an immune cell (e.g., a CD8⁺ T cell), target protein expression, or a combination of the foregoing.

### g) Immunity/Inflammation

[0305] In some embodiments, the methods of the disclosure relate to immunity. In some embodiments, the immunity is related to bacteria, parasites, viruses, fungi, and/or cancer cells. In some embodiments, the immunity is autoimmunity and is the result of the immune system attacking self-molecules. In some embodiments, the methods relate to treatment of immunological tolerance.

[0306] In some embodiments of the disclosure, the methods relate to treatment of inflammation. In some embodiments, the inflammation is acute or of relatively short duration, lasting minutes to hours. In still other embodiments, the inflammation is chronic or of longer duration, lasting weeks to months, and possibly years. In some embodiments, the methods disclosed herein relate to the treatment or prevention of conditions associated with inflammation. In certain embodiments, such conditions include but are not limited to flushed skin, pain or tenderness, swelling, heat, fatigue, fever, joint pain or stiffness, mouth sores, rashes. In some embodiments, inflammation is resultant from another disease or disorder.

[0307] In some embodiments, the disclosed methods relate to the treatment of autoimmune diseases. In some embodiments, the autoimmune disease may include but is not limited to disease of the joint and muscles (e.g., psoriatic arthritis, rheumatoid arthritis, Sjogren's syndrome, systemic lupus erythematosus), diseases of the digestive track (e.g., Crohn's disease, celiac disease, ulcerative colitis, inflammatory bowel diseases), diseases of the endocrine system (e.g., Graves' disease, Hashimoto's thyroiditis, Addison's disease), diseases of the skin (e.g., dermatomyositis, psoriasis, scleroderma), disease of the nervous system (e.g., chronic inflammatory demyelinating polyneuropathy, Guillain-Barre syndrome, multiple sclerosis), and other diseases (e.g., myasthenia gravis, autoimmune vasculitis, pernicious anemia, vasculitis, autoimmune lymphoproliferative syndrome, type 1 diabetes).

[0308] In some embodiments, the disease or condition is an inflammatory disease and/or an autoimmune disease. A wide variety of inflammatory and/or autoimmune diseases are treatable according to the methods described herein. In some embodiments, the inflammatory and/or autoimmune disease comprises Alzheimer's disease, asthma, endometriosis, inflammatory bowel disease (IBD) (e.g., Crohn's disease and ulcerative colitis), multiple sclerosis (MS), non-fatty liver disease (e.g., nonalcoholic fatty liver disease (NAFLD)), obesity, Parkinson's disease cancer, psoriasis, rheumatoid arthritis (RA), scleroderma, systemic lupus erythematosus (SLE), type 1 diabetes, type 2 diabetes, or a combination thereof.

[0309] In some embodiments, the target protein activates an immune response. In certain embodiments, the target protein inhibits an immune response. In some embodiments, the immune response is an innate immune response (e.g., a humoral and/or a cell-mediated immune response). In certain embodiments, the immune response is an adaptive immune response (e.g., a humoral and/or a cell-mediated immune response). Non-limiting examples of immune responses includes T-cell mediated immune responses (e.g., cytokine production and cellular cytotoxicity), B-cell mediated immune responses, humoral immune responses, and activation of cytokine responsive cells (e.g., macrophages).

[0310] In some embodiments, the target protein enhances a signal involved in T cell activation and/or survival. In certain embodiments, the target protein activates a stimulatory checkpoint molecule. Non-limiting examples of stimulatory checkpoint molecules include CD27, CD28, CD40, CD122, CD137, OX40, glucocorticoid-induced TNFR family related gene (GITR), inducible T-cell costimulator (ICOS).

[0311] In particular embodiments, the target protein is an agonist to IL-2.

[0312] In some embodiments, the target protein reduces a signal involved in T cell anergy and/or exhaustion. In certain embodiments, the target protein inhibits an inhibitory checkpoint molecule. Non-limiting examples of inhibitory checkpoint molecules include programmed cell death protein 1 (PD-1), PD-L1, PD-L2, T-cell immunoglobulin domain and mucin domain 3 (TIM-3), lymphocyte activation gene-3 (LAG-3), cytotoxic T-lymphocyte-associated protein 4 (CTLA-4), Adenosine A2A receptor (A2AR), B7-H3 (CD276), B7-H4 (VTCN1), B and T lymphocyte attenuator (BTLA), Indoleamine 2,3-dioxygenase (IDO), killer-cell immunoglobulin-like receptor (KIR), nicotinamide adenine dinucleotide phosphate NADPH oxidase isoform 2 (NOX2), V-domain Ig suppressor of T cell activation (VISTA), sialic acid-binding immunoglobulin-type lectin 7 (SIGLECs 7) and sialic acid-binding immunoglobulin-type lectin 9 (SIGLECs 9). In particular embodiments, the target protein is an inhibitor to PD-1.

[0313] In some embodiments, the treatment modulates (e.g., increases) the subject's immune system.

[0314] In certain embodiments, the treatment modulates (e.g., increase or decrease): a) lymph node innervation;
[0315] b) the development of HEVs and/or TLOs;
[0316] c) immune cell: migration, proliferation, recruitment, lymph node homing, lymph node egress, tumor homing, tumor egress, differentiation, activation, polarization, cytokine production, degranulation, maturation, ADCC, ADCP, antigen presentation, target expression (e.g., protein or transcript), or a combination thereof, or a combination of the foregoing.

[0317] In some embodiments, the effective amount is sufficient to modulate (e.g., increase or decrease) the subject's immune system.

[0318] In certain embodiments, the effective amount is sufficient to modulate (e.g., increase or decrease):
[0319] a) lymph node innervation;
[0320] b) the development of HEVs and/or TLOs;
[0321] c) immune cell: migration, proliferation, recruitment, lymph node homing, lymph node egress, tumor homing, tumor egress, differentiation, activation, polarization, cytokine production, degranulation, maturation, ADCC, ADCP, antigen presentation, target expression (e.g., protein or transcript), or a combination thereof, or a combination of the foregoing.

[0322] In some embodiments, the effective amount is sufficient to modulate (e.g., increase or decrease):
[0323] a) development of HEVs and/or TLOs;
[0324] b) immune-cell activation, degranulation, differentiation, maturation, migration, polarization, proliferation, and/or recruitment;
[0325] c) immune-cell lymph-node egress and/or homing;
[0326] d) immune-cell tumor egress and/or homing;
[0327] e) cytokine production;
[0328] f) antigen presentation;
[0329] g) target protein expression; or
[0330] h) auto-antibody levels, or a combination thereof.

[0331] In some embodiments, the effective amount is sufficient to increase:
[0332] a) development of HEVs and/or TLOs;
[0333] b) immune-cell activation, degranulation, differentiation, maturation, migration, polarization, proliferation, and/or recruitment;
[0334] c) immune-cell lymph-node egress and/or homing;
[0335] d) immune-cell tumor egress and/or homing;
[0336] e) cytokine production;
[0337] f) antigen presentation;
[0338] g) target protein expression; or
[0339] h) auto-antibody levels, or a combination thereof.

[0340] In certain embodiments, said increase is by at least about 10%, e.g., by at least about: 15%, 20%, 25%, 30%, 35%, 40%, 45%, 50%, 55%, 60%, 65%, 70%, 75%, 80%, 85%, 90%, 91%, 92%, 93%, 94%, 95%, 96%, 97%, 98% or 99%. In particular embodiments, said increase is about 10-99%, e.g., about: 10-98%, 15-98%, 15-97%, 20-97%, 20-96%, 25-96%, 25-95%, 30-95%, 30-94%, 35-94%, 35-93%, 40-93%, 40-92%, 45-92%, 45-91%, 50-91%, 50-90%, 55-90%, 55-85%, 60-85%, 60-80%, 65-80%, 65-75%, or 70-75%.

[0341] In some embodiments, the effective amount is sufficient to decrease:
[0342] a) development of HEVs and/or TLOs;
[0343] b) immune-cell activation, degranulation, differentiation, maturation, migration, polarization, proliferation, and/or recruitment;
[0344] c) immune-cell lymph-node egress and/or homing;
[0345] d) immune-cell tumor egress and/or homing;
[0346] e) cytokine production;
[0347] f) antigen presentation;
[0348] g) target protein expression; or
[0349] h) auto-antibody levels,
[0350] or a combination thereof.

[0351] In certain embodiments, said decrease is by at least about 10%, e.g., by at least about: 15%, 20%, 25%, 30%, 35%, 40%, 45%, 50%, 55%, 60%, 65%, 70%, 75%, 80%, 85%, 90%, 91%, 92%, 93%, 94%, 95%, 96%, 97%, 98% or 99%. In particular embodiments, said decrease is about 10-99%, e.g., about: 10-98%, 15-98%, 15-97%, 20-97%, 20-96%, 25-96%, 25-95%, 30-95%, 30-94%, 35-94%, 35-93%, 40-93%, 40-92%, 45-92%, 45-91%, 50-91%, 50-90%, 55-90%, 55-85%, 60-85%, 60-80%, 65-80%, 65-75%, or 70-75%.

[0352] In some embodiments, the effective amount is sufficient to:
[0353] a) increase organ function;
[0354] b) modulate (e.g., increase or decrease) inflammation;
[0355] c) decrease the level of auto-antibody;
[0356] d) decrease rate and/or number of relapses and/or flare-ups;
[0357] e) decrease viral load; or
[0358] f) decrease (e.g., control) infection,
[0359] or a combination of the foregoing.

[0360] In some embodiments, the effective amount is sufficient to increase organ function, inflammation, or a combination thereof. In certain embodiments, said increase is by at least about 10%, e.g., by at least about: 15%, 20%, 25%, 30%, 35%, 40%, 45%, 50%, 55%, 60%, 65%, 70%, 75%, 80%, 85%, 90%, 91%, 92%, 93%, 94%, 95%, 96%, 97%, 98% or 99%. In particular embodiments, said increase is about 10-99%, e.g., about: 10-98%, 15-98%, 15-97%, 20-97%, 20-96%, 25-96%, 25-95%, 30-95%, 30-94%, 35-94%, 35-93%, 40-93%, 40-92%, 45-92%, 45-91%, 50-91%, 50-90%, 55-90%, 55-85%, 60-85%, 60-80%, 65-80%, 65-75%, or 70-75%.

[0361] In some embodiments, the effective amount is sufficient to decrease inflammation, the level of auto-antibody, rate and/or number of relapses and/or flare-ups, viral load or infection, or a combination of the foregoing. In certain embodiments, said decrease is by at least about 10%, e.g., by at least about: 15%, 20%, 25%, 30%, 35%, 40%, 45%, 50%, 55%, 60%, 65%, 70%, 75%, 80%, 85%, 90%, 91%, 92%, 93%, 94%, 95%, 96%, 97%, 98% or 99%. In particular embodiments, said decrease is about 10-99%, e.g., about: 10-98%, 15-98%, 15-97%, 20-97%, 20-96%, 25-96%, 25-95%, 30-95%, 30-94%, 35-94%, 35-93%, 40-93%, 40-92%, 45-92%, 45-91%, 50-91%, 50-90%, 55-90%, 55-85%, 60-85%, 60-80%, 65-80%, 65-75%, or 70-75%.

[0362] In some embodiments, the target protein activates an immune cell. In some embodiments, the target protein inhibits an immune cell. Immune cells are cells that play a role in the immune response. Immune cells are of hematopoietic origin, including lymphocytes (e.g., B cells and T cells), natural killer cells, and myeloid cells (e.g., basophils, eosinophils, granulocytes, macrophages, mast cells, and monocytes). The target protein can be expressed on a cancer cell (e.g., a metastatic cancer cell), in the tumor microenvironment (e.g., on a stromal cell), or on a non-malignant cell (e.g., an immune cell).

[0363] In some embodiments, the effective amount is sufficient to increase an immune response. In certain embodiments, said increase is by at least about 10%, e.g., by at least about: 15%, 20%, 25%, 30%, 35%, 40%, 45%, 50%, 55%, 60%, 65%, 70%, 75%, 80%, 85%, 90%, 91%, 92%, 93%, 94%, 95%, 96%, 97%, 98% or 99%. In particular embodiments, said increase is about 10-99%, e.g., about: 10-98%, 15-98%, 15-97%, 20-97%, 20-96%, 25-96%, 25-95%, 30-95%, 30-94%, 35-94%, 35-93%, 40-93%, 40-92%, 45-92%, 45-91%, 50-91%, 50-90%, 55-90%, 55-85%, 60-85%, 60-80%, 65-80%, 65-75%, or 70-75%.

[0364] In some embodiments, the effective amount is sufficient to reduce an immune response. In certain embodiments, said reduction is by at least about 10%, e.g., by at least about: 15%, 20%, 25%, 30%, 35%, 40%, 45%, 50%, 55%, 60%, 65%, 70%, 75%, 80%, 85%, 90%, 91%, 92%, 93%, 94%, 95%, 96%, 97%, 98% or 99%. In particular embodiments, said reduction is about 10-99%, e.g., about: 10-98%, 15-98%, 15-97%, 20-97%, 20-96%, 25-96%, 25-95%, 30-95%, 30-94%, 35-94%, 35-93%, 40-93%, 40-92%, 45-92%, 45-91%, 50-91%, 50-90%, 55-90%, 55-85%, 60-85%, 60-80%, 65-80%, 65-75%, or 70-75%.

[0365] In some embodiments, the effective amount is sufficient to reduce an inflammatory response. In certain embodiments, said reduction is by at least about 10%, e.g., by at least about: 15%, 20%, 25%, 30%, 35%, 40%, 45%, 50%, 55%, ⁶⁰, 65%, 70%, 75% 80%, 85%, 90%, 91%, 92%, 93%, 94%, 95%, 96%, 97%, 98% or 99%. In particular embodiments, said reduction is about 10-99%, e.g., about: 10-98%, 15-98%, 15-97%, 20-97%, 20-96%, 25-96%, 25-95%, 30-95%, 30-94%, 35-94%, 35-93%, 40-93%, 40-92%, 45-92%, 45-91%, 50-91%, 50-90%, 55-90%, 55-85%, 60-85%, 60-80%, 65-80%, 65-75%, or 70-75%.

[0366] In some embodiments, the effective amount is sufficient to reduce autoimmunity. In certain embodiments, said reduction is by at least about 10%, e.g., by at least about: 15%, 20%, 25%, 30%, 35%, 40%, 45%, 50%, 55%, 60%, 65%, 70%, 75%, 80%, 85%, 90%, 91%, 92%, 93%, 94%, 95%, 96%, 97%, 98% or 99%. In particular embodiments, said reduction is about 10-99%, e.g., about: 10-98%, 15-98%, 15-97%, 20-97%, 20-96%, 25-96%, 25-95%, 30-95%, 30-94%, 35-94%, 35-93%, 40-93%, 40-92%, 45-92%, 45-91%, 50-91%, 50-90%, 55-90%, 55-85%, 60-85%, 60-80%, 65-80%, 65-75%, or 70-75%.

[0367] In certain embodiments, the effective amount is sufficient to modulate expression of the target protein in an immune cell.

[0368] In some embodiments (e.g., immune and/or inflammation treatment), the effective amount is sufficient to modulate (e.g., increase or decrease) migration of an immune cell (e.g., an antigen presenting cell (such as a dendritic cell and/or a macrophage) and/or a T cell), proliferation of an immune cell, recruitment of an immune cell (e.g., an antigen presenting cell (such as a dendritic cell and/or a macrophage), a monocyte, a T cell, and/or a B cell), lymph node homing of an immune cell (e.g., a dendritic cell and/or a T cell), lymph node egress of an immune cell (e.g., a dendritic cell and/or a T cell), differentiation of an immune cell, activation of an immune cell, polarization of an immune cell, cytokine production (e.g., increase pro-inflammatory cytokine, decrease pro-inflammatory cytokine, increase anti-inflammatory cytokine, decrease anti-inflammatory cytokine), degranulation of an immune cell, maturation of an immune cell, antigen presentation, target protein expression, inflammation, an auto-antibody level; to increase an organ function; to decrease the rate and/or number of relapses or flare-ups, viral load; to control infection or a combination of the foregoing.
[0369] h) Aging

[0370] The methods described herein are applicable to the treatment of aging, age-related conditions, and/or age-related disorders or diseases. In some embodiments, the methods described herein include treatment of general health, body temperature, body weight, body height, waist circumference, reproductive ability, body fat, heart rate, blood pressure, pulse rate, blood oxygen level, respiratory rate, breathing pattern, blood glucose level, blood pH, cardiac output, cardiac rhythm, as well as concentration of certain substances in the blood. In some embodiments, treatment may be assessed by measurement of complete blood count, red blood cells, white blood cells, platelets, hemoglobin, hematocrit, mean corpuscular volume, basic metabolic panel, blood glucose, calcium, electrolyte test, kidney function, blood enzyme tests, troponin, creatine kinase, lipoprotein panel, total cholesterol, LDL cholesterol, HDL cholesterol, triglycerides, coagulation panel, and/or bone marrow tests.

[0371] In some embodiments, the effective amount is sufficient to slow aging. In certain embodiments, said slowing is by at least about 10%, e.g., by at least about: 15%, 20%, 25%, 30%, 35%, 40%, 45%, 50%, 55%, 60%, 65%, 70%, 75%, 80%, 85%, 90%, 91%, 92%, 93%, 94%, 95%, 96%, 97%, 98% or 99%. In particular embodiments, said slowing is about 10-99%, e.g., about: 10-98%, 15-98%, 15-97%, 20-97%, 20-96%, 25-96%, 25-95%, 30-95%, 30-94%, 35-94%, 35-93%, 40-93%, 40-92%, 45-92%, 45-91%, 50-91%, 50-90%, 55-90%, 55-85%, 60-85%, 60-80%, 65-80%, 65-75%, or 70-75%.
[0372] i) Senescence

[0373] In some embodiments, the methods disclosed herein are for the treatment of senescence. In still further embodiments, the method disclosed herein relate the treatment of senescent associated diseases or disorders. In some embodiments, the disease or disorder includes but it not limited to diabetes, metabolic syndrome, and obesity. In other embodiments, the disease or disorder is related to photosensitivity or photoaging. In still further embodiments, the disease or disorder may be selected from arthritis, Alzheimer's disease, asthma, blindness, cancer, chronic bronchitis, chronic kidney disease, chronic obstructive pulmonary disease, coronary heart disease, deep vein thrombosis, dementia, depression, diabetes, epilepsy, heart failure, high cholesterol, hypertension, motor neuron disease, multiple sclerosis, osteoporosis, Paget's disease of bone, Parkinson's diseases, shingles, and stroke.

[0374] In some embodiments, the effective amount is sufficient to reduce senescence. In certain embodiments, said reduction is by at least about 10%, e.g., by at least about: 15%, 20%, 25%, 30%, 35%, 40%, 45%, 50%, 55%, 60%, 65%, 70%, 75%, 80%, 85%, 90%, 91%, 92%, 93%, 94%, 95%, 96%, 97%, 98% or 99%. In particular embodiments, said reduction is about 10-99%, e.g., about: 10-98%, 15-98%, 15-97%, 20-97%, 20-96%, 25-96%, 25-95%, 30-95%, 30-94%, 35-94%, 35-93%, 40-93%, 40-92%, 45-92%, 45-91%, 50-91%, 50-90%, 55-90%, 55-85%, 60-85%, 60-80%, 65-80%, 65-75%, or 70-75%.
[0375] j) Fibrosis

[0376] In some embodiments, the methods of the disclosure relate to the treatment of fibrosis. In some embodiments, the methods relate to treatment of conditions related to or resultant from fibrosis. In some embodiments, the fibrosis is pulmonary fibrosis, liver fibrosis, skin fibrosis, renal fibrosis, pancreas fibrosis, systemic sclerosis, cardiac fibrosis, mediastinal fibrosis, bone marrow fibrosis, retroperitoneal cavity fibrosis, and/or macular degeneration.

[0377] In some embodiments, the effective amount is sufficient to reduce fibrosis. In certain embodiments, said reduction is by at least about 10%, e.g., by at least about: 15%, 20%, 25%, 30%, 35%, 40%, 45%, 50%, 55%, 60%, 65%, 70%, 75%, 80%, 85%, 90%, 91%, 92%, 93%, 94%, 95%, 96%, 97%, 98% or 99%. In particular embodiments, said reduction is about 10-99%, e.g., about: 10-98%, 15-98%, 15-97%, 20-97%, 20-96%, 25-96%, 25-95%, 30-95%, 30-94%, 35-94%, 35-93%, 40-93%, 40-92%, 45-92%, 45-91%, 50-91%, 50-90%, 55-90%, 55-85%, 60-85%, 60-80%, 65-80%, 65-75%, or 70-75%.
[0378] k) Infections

[0379] In some embodiments, the disclosure relates to treatment of infections. In some aspects, the infection is a bacterial infection, a protozoan infection, a viral infection, a fungal infection, or another pathogenic infection. In some embodiments, the infection is AIDS or HIV, viral hepatitis (e.g. hepatitis A, hepatitis B, hepatitis C), tuberculosis, salmonella, Lyme disease, meningococcal disease, influenza, measles, mumps, rubella (e.g. German measles), pneumonia, a sexually transmitted disease (e.g. syphilis, chlamydia, gonorrhea), chronic sinusitis, whooping cough, pertussis, or a combination thereof.

[0380] Unless otherwise defined, all terms of art, notations and other scientific terms or terminology used herein are intended to have the meanings commonly understood by those of skill in the art to which this disclosure pertains. In some cases, terms with commonly understood meanings are defined herein for clarity and/or for ready reference, and the inclusion of such definitions herein should not necessarily be construed to represent a substantial difference over what is generally understood in the art. It will be further understood that terms, such as those defined in commonly-used dictionaries, should be interpreted as having a meaning that is consistent with their meaning in the context of the relevant art and/or as otherwise defined herein.

[0381] The terminology used herein is for the purpose of describing particular embodiments only and is not intended to be limiting.

[0382] As used herein, the indefinite articles “a,” “an” and “the” should be understood to include plural reference unless the context clearly indicates otherwise.

[0383] Throughout this specification and the claims which follow, unless the context requires otherwise, the word “comprise,” and variations such as “comprises” and “comprising”, will be understood to imply the inclusion of, e.g., a stated integer or step or group of integers or steps, but not the exclusion of any other integer or step or group of integer or step. When used herein, the term “comprising” can be substituted with the term “containing” or “including.”

[0384] As used herein, “consisting of” excludes any element, step, or ingredient not specified in the claim element. When used herein, “consisting essentially of” does not exclude materials or steps that do not materially affect the basic and novel characteristics of the claim. Any of the terms “comprising,” “containing,” “including,” and “having,” whenever used herein in the context of an aspect or embodiment of the disclosure, can in some embodiments, be replaced with the term “consisting of,” or “consisting essentially of” to vary scopes of the disclosure.

[0385] As used herein, the conjunctive term “and/or” between multiple recited elements is understood as encompassing both individual and combined options. For instance, where two elements are conjoined by “and/or,” a first option refers to the applicability of the first element without the second. A second option refers to the applicability of the second element without the first. A third option refers to the applicability of the first and second elements together. Any one of these options is understood to fall within the meaning, and, therefore, satisfy the requirement of the term “and/or” as used herein. Concurrent applicability of more than one of the options is also understood to fall within the meaning, and, therefore, satisfy the requirement of the term “and/or.”

[0386] When a list is presented, unless stated otherwise, it is to be understood that each individual element of that list, and every combination of that list, is a separate embodiment. For example, a list of embodiments presented as “A, B, or C” is to be interpreted as including the embodiments, “A,” “B,” “C,” “A or B,” “A or C,” “B or C,” or “A, B, or C.”

### EXEMPLIFICATION

### Example 1: Validation of a Target Protein Acting as a Cytokine on T Cells

[0387] This example demonstrates the ability of a target protein of the disclosure to function as a cytokine on mammalian T cells. In this example, Human T cell line (Jurkat, ATCC) cells are treated with supernatant from transduced HEK293 T that each contain an overexpressed target protein of interest. HEK293T cells (1×10⁵/well) are seeded in a 96-well plate (200 μl per well) to reach around about 70-90% of confluence in the next day (e.g. 12-36 hrs).

[0388] Two V-bottom 96-well plates are prepared, and mixtures are made as indicated in Table B below, per construct.

TABLE B

| | | |
|---|---|---|
| Plate A | Plate B | Notes |

| | | | | |
|---|---|---|---|---|
| Plasmid DNA | 2 | μl | | GeneScript |
| Cellecta Packaging | 0.5 | μl | | |
| Mix | | | | |
| P3000 | 0.5 | μl | | |
| Lipofectamine 3000 | | | 0.75 μl | Invitrogen |
| Opti-MEM media | 12.5 | μl | 12.5 μl | Invitrogen |

### Construct Used are Designed as Follows:

[0389] Doxycycline-inducible expression of target proteins are generated with an InDOXible Tet-Activated lentiviral cDNA expression system (Cellecta). All target proteins genes are cloned into the pFL69-TRE-rtTA-Blast (Cellecta #SVRTTATB-P) using the Bst XI restriction enzyme site (FIG. 14).

[0390] To produce the lentivirus containing the target proteins, the cloned lentiviral vectors are transfected with a lentiviral package mix (Cellecta #CPCP-K2A) to the HEK293T cells as detailed next. 24 hrs after cell seeding, plate A mixture is transferred into the plate B and mixed by pipetting gently. Cells are incubated, and DNA-lipofectamine is added to the mixture of cells. Transfected cells are incubated in CO₂ incubator at 37° C. for 24 hrs.

[0391] To harvest virus, the transfected cells are centrifuged in a 96-well plate at 1650 rpm for 5 mins. 150 μl of the supernatant is transferred to a new V-bottom 96-well plate and centrifuged at 1650 rpm for 5 mins. 150 μl of the supernatant is transferred carefully to the cells that are already placed in 96-well plate (U-bottom).

[0392] To transduce Jurkat cells, 150 μl of the virus is transferred to the Jurkat cells. The cells are centrifuged in the 96-well plate at 1650 rpm for 1 hr (32° C.) using the spinoculation method. The supernatant is discarded, and cells are resuspended with 200 μl of complete media. The cells are incubated overnight at 37° C.

[0393] 24 hrs post spinoculation, the cells are centrifuged and resuspended with complete media (with Pen/Strep) plus Blasticidin (Final Conc. 10 μg/ml, 1:1000 dilution from the original tube ThermoFisher #A1113903). After 48 hrs, cells are processed for flow cytometry and staining for expression of CD69 (Invitrogen, #MA5-18150). 5 μl of CD3/CD28 antibody complex (StemCell Technologies, ImmunoCult™ Human CD3/CD28 T Cell Activator) is added as a positive control to stimulate T cells. Cells are incubated at 37° C. for 24 hrs. An upregulated CD69 expression in the Jurkat cells suggests that the target protein is a cytokine acting on T cells.

### Example 2: Validation of a Target Protein as a Cytokine (i.e, scRNAseq Hashing)

[0394] This example demonstrates the ability of a target protein of the disclosure to act as a cytokine by single-cell RNA sequencing to look for shifts in cell populations after treatment with the target protein. In this example, the human primary blood mononuclear cells are seeded at 1×10⁶ PBMC in each well of a 12-well plate with 1 ml of RPMI-1640 (10% FBS). PBMCs are treated with 1 g/mL LPS (Sigma-Aldrich) for 24 hrs, plus or minus target protein for a final concentration of 10 μM, or left untreated. The target protein (e.g., listed in the Sequence Listing) are ordered through GenScript Biotech (Piscataway, NJ). Peptides are synthesized through Fluorenylmethyloxycarbonyl (Fmoc) protection group chemistry using Solid Phase Peptide Synthesis (SPPS).

[0395] The single-cell suspensions are harvested and centrifuged at 400×g for 5 mins at 4° C. The media is discarded, and the cells are resuspended with 1 ml of cell staining buffer (BioLegend 420201). 5 μl of Human TruStain FcX (BioLegend 422301) is added to the cells and incubated at 4° C. for 10 mins. 1 μg of single-cell hashing antibody (BioLegend TotalSeq-B #1-#10) is added to cells along with ˜50 μl of cell staining buffer to make 100 μl total volume. This is incubated for 4° C. for 30 mins, then washed three times at 400×g. 10 different cell hashing samples are pooled into one tube with desired cell number (˜1000 cells/μl).

[0396] Single cells are processed through Chromium Next GEM Single Cell 3′_Reagent Kit (Dual Index) (10× Genomics CG000317 Rev C) following the provided protocol from 10× Genomics. Briefly, samples are processed through GEM generation and barcoding, post GEM-RT Cleanup and cDNA amplification, 3′ Gene expression library construction, cell surface protein library construction and finally sequencing.

[0397] Post sequencing, reads are aligned to the human reference genome (GENCODE34/GRCH38). Reads are demultiplexed using DNA-barcoded antibodies and run through quality control (e.g. doublets are removed, singlet cells are selected with less than 15% mitochondria contamination at RNA levels, and reads contain higher than 500 genes). The raw data is normalized. Principal component analysis is performed, and cell clusters are annotated. Differential gene expression analysis is performed between controls and treatment with the target protein. Increase in inflammatory cell populations (e.g. Th1 CD4⁺ T Cells, CD8⁺ T Cells) after treatment with the target protein is observed in cells where the target protein is immune stimulating. Additionally, increase in immune repressing cell populations (e.g. T regulatory cells) after treatment with target protein is observed in cells where the target protein is immune dampening.

### Example 3. Validation of a Target Protein as a Cytokine (i.e, scRNAseq Hashing)

[0398] In one aspect, this demonstrates the validation of a Target Protein, SEQ ID NO: 6516, as a cytokine modulator. SEQ ID NO: 6516 is a novel, secreted peptide that inhibits the innate immune response caused by other circulating factors; toll-like receptor agonists. Thus, SEQ ID NO: 6516 is a monocyte and dendritic cell modulating cytokine and will be suitable for the treatment of diseases caused by a pathological innate immune response such as lupus, multiple sclerosis, and rheumatoid arthritis.

[0399] To determine the effect of the Target Protein on TLR activity, the Target Protein, irrelevant proteins, and controls were applied+/−established TLR agonists to a commercial reporter cell line which monitors the two main signal transduction pathways that respond to TLR activation. To determine which primary, human, immune cells are most responsive to the Target Proteins, the Target Proteins were applied to Peripheral Blood Mononuclear Cells (PBMCs) and then 24 hours later the PBMCs were subjected to single cell RNA-seq.

### Materials and Methods

[0400] Dual Reporter Assay: NF-kB-SEAP and IRF-Lucia luciferase reporter monocyte (THP1) cells (InvivoGen) are cultured in RPMI 1640 media supplemented with HEPES buffer (10 mM), sodium pyruvate (1 mM), glucose (4.5 g/L), fetal bovine serum (10%), penicillin (100 U/mL), streptomycin (100 g/mL), and 2-mercaptoethanol (0.05 mM). THP1 cells are treated with 100 ng/mL LPS (Sigma-Aldrich) for 24 hrs, the target protein (final conc. 10 μM), or left untreated.

[0401] After treatment, THP1 cells are cultured for 24 hrs and then assayed for reporter activity. Both reporter proteins are measurable in the cell culture supernatant when using QUANTI-Blue (InvivoGen), a SEAP detection reagent, and QUANTI-Luc (InvivoGen), a luciferase detection reagent. QUANTI-Blue is a colorimetric enzyme assay developed to determine any alkaline phosphatase activity in a biological sample, such as cell culture supernatant. QUANTI-Luc is a lyophilized assay reagent containing all the components required to quantitatively measure the activity of Lucia Luciferase other coelenterazine-utilizing luciferases. Increased reporter activity after treatment with target protein is observed in cells where the target protein is immune stimulating. Additionally, decreased reporter activity after treatment with the target protein is observed in cells where the target protein is immune dampening.

[0402] scRNA-seq: From example: Shifts in cell populations after treatment with Target Proteins are assessed by single cell RNA-seq (scRNA-seq). Target proteins (e.g., listed in Table 1) are synthesized through Fluorenylmethyloxycarbonyl (Fmoc) protection group chemistry using Solid Phase Peptide Synthesis (SPPS). Human primary blood mononuclear cells are seeded at 1×10 PBMC in each well of 12-well plate with 1 ml of RPMI-1640 (10% FBS). PBMCs are treated with 1 g/mL LPS (Sigma-Aldrich) for 24 hrs, plus or minus target proteins for a final concentration of 10 μM or left untreated. The single cell suspensions are harvested and centrifuged at 400×g for 5 mins at 4° C. The media is discarded, and the cells are resuspended with 1 ml of cell staining buffer (BioLegend). 5 μl of Human TruStain FcX (BioLegend) is added to the cells and incubated at 4° C. for 10 mins. 1 μg of single cell hashing antibody (BioLegend) is added to cells along with ˜50 μl of cell staining buffer to make 100 μl total volume. This is incubated for 4° C. for 30 mins then washed three times at 400×g. 10 different cell hashing samples are pooled in one tube with desired cell number (˜1000 cells/μl).

[0403] Single cells are processed through Chromium Next GEM Single Cell 3′ _Reagent Kit (Dual Index) (10× Genomics CG000317 Rev C) following the provided protocol from 10× Genomics. Briefly, samples are processed through GEM generation and barcoding, post GEM-RT Cleanup and cDNA amplification, 3′ gene expression library construction, cell surface protein library construction and finally sequencing.

[0404] Post sequencing, reads are aligned to the human reference genome (GENCODE34/GRCH38). Reads are demultiplexed using DNA-barcoded antibodies and run through quality control (g. doublets are removed, singlet cells are selected with less than 15% mitochondria contamination at RNA levels and reads contain higher than 500 genes). The raw data is normalized. Principal component analysis is performed, and cell clusters are annotated. Differential gene expression analysis is performed between controls and treatment with target protein. Shifts in cell population dynamics observed by principal component analysis and/or shifts in gene expression post treatment with target protein in supernatant validates that target protein acts as a circulating factor.

[0405] SEQ ID NO: 6516 significantly blocks the IRF signal transduction pathway response from several TLRs. Up-regulation of the IRF pathway is linked to many autoimmune diseases, especially to lupus. Consistent with a connection to innate immune related diseases like lupus, SEQ ID NO: 6516 strongly affected active monocytes and dendritic cells while having relatively small effects on T-cells, B-cells, and NK-cells (FIG. 1, FIG. 2, FIG. 3A and FIG. 3B).

### Other Hits:

| Target Protein | Relative activity |
|---|---|
| SEQ ID NO: 6520 | +++ |

### Example 4: Validation of a Target Protein as a Cytokine on Monocytes

[0406] This example demonstrates the ability of a target protein of the disclosure to function as a cytokine on mammalian monocytes. In this example, the target proteins (e.g., listed in the Sequence Listing) are ordered through GenScript Biotech (Piscataway, NJ). Peptides are synthesized through Fluorenylmethyloxycarbonyl (Fmoc) protection group chemistry using Solid Phase Peptide Synthesis (SPPS). NF-kB-SEAP and IRF-Lucia luciferase reporter monocyte (THP1) cells (InvivoGen, #thpd-nfis) are cultured in RPMI 1640 media supplemented with HEPES buffer (10 mM), sodium pyruvate (1 mM), glucose (4.5 g/L), fetal bovine serum (10%), penicillin (100 U/mL), streptomycin (100 g/mL), and 2-mercaptoethanol (0.05 mM). THP1 cells are treated with 1 g/mL LPS (Sigma-Aldrich) for 24 hrs, the target protein (final conc. 10 μM), or left untreated.

[0407] After treatment, THP1 cells are cultured for 12 hrs and then assayed for reporter activity. Both reporter proteins are measurable in the cell culture supernatant when using QUANTI-Blue™ (InvivoGen, #rep-qbs), a SEAP detection reagent, and QUANTI-Luc™ (InvivoGen, #rep-qlc1), a luciferase detection reagent. QUANTI-Blue is a colorimetric enzyme assay developed to determine any alkaline phosphatase activity in a biological sample, such as cell culture supernatant. QUANTI-Luc is a lyophilized assay reagent containing all the components required to quantitatively measure the activity of Lucia Luciferase other coelenterazine-utilizing luciferases. Increased reporter activity after treatment with target protein is observed in cells where the target protein is immune stimulating. Additionally, decreased reporter activity after treatment with the target protein is observed in cells where the target protein is immune dampening.

### Example 5. Validation of a Target Protein as a Cytokine on Monocytes

[0408] In one aspect, this example demonstrates the validation of a Target Protein, SEQ ID NO: 6516, as a cytokine that affects monocytes. SEQ ID NO: 6516 is a novel, secreted peptide that inhibits toll-like receptor activity on monocytes and dendritic cells. Thus, SEQ ID NO: 6516 is an innate immune cell modulating cytokine and will be suitable for the treatment of diseases caused by a pathological innate immune response such as lupus, multiple sclerosis, and rheumatoid arthritis.

[0409] To determine the effect of the Target Protein on TLR activity, the Target Protein, irrelevant proteins and controls were applied+/−established TLR agonists to a commercial reporter cell line which monitors the two main signal transduction pathways that respond to TLR activation. To determine which primary, human, immune cells are most responsive to the Target Proteins, the Target Proteins were applied to Peripheral Blood Mononuclear Cells (PBMCs) and then 24 hours later the PBMCs were subjected to single cell RNA-seq.

### Materials and Methods

[0410] Dual Reporter Assay: NF-kB-SEAP and IRF-Lucia luciferase reporter monocyte (THP1) cells (InvivoGen) are cultured in RPMI 1640 media supplemented with HEPES buffer (10 mM), sodium pyruvate (1 mM), glucose (4.5 g/L), fetal bovine serum (10%), penicillin (100 U/mL), streptomycin (100 g/mL), and 2-mercaptoethanol (0.05 mM). THP1 cells are treated with 100 ng/mL LPS (Sigma-Aldrich) for 24 hrs, the target protein (final conc. 10 μM), or left untreated.

[0411] After treatment, THP1 cells are cultured for 24 hrs and then assayed for reporter activity. Both reporter proteins are measurable in the cell culture supernatant when using QUANTI-Blue (InvivoGen), a SEAP detection reagent, and QUANTI-Luc (InvivoGen), a luciferase detection reagent. QUANTI-Blue is a colorimetric enzyme assay developed to determine any alkaline phosphatase activity in a biological sample, such as cell culture supernatant. QUANTI-Luc is a lyophilized assay reagent containing all the components required to quantitatively measure the activity of Lucia Luciferase other coelenterazine-utilizing luciferases. Increased reporter activity after treatment with target protein is observed in cells where the target protein is immune stimulating. Additionally, decreased reporter activity after treatment with the target protein is observed in cells where the target protein is immune dampening.

[0412] scRNA-seq: From example: Shifts in cell populations after treatment with Target Proteins are assessed by single cell RNA-seq (scRNA-seq). Target proteins (e.g., listed in Table 1) are synthesized through Fluorenylmethyloxycarbonyl (Fmoc) protection group chemistry using Solid Phase Peptide Synthesis (SPPS). Human primary blood mononuclear cells are seeded at 1×10 PBMC in each well of 12-well plate with 1 ml of RPMI-1640 (10% FBS). PBMCs are treated with 1 g/mL LPS (Sigma-Aldrich) for 24 hrs, plus or minus target proteins for a final concentration of 10 μM or left untreated. The single cell suspensions are harvested and centrifuged at 400×g for 5 mins at 4° C. The media is discarded, and the cells are resuspended with 1 ml of cell staining buffer (BioLegend). 5 μl of Human TruStain FcX (BioLegend) is added to the cells and incubated at 4° C. for 10 mins. 1 μg of single cell hashing antibody (BioLegend TotalSeq) is added to cells along with ˜50 μl of cell staining buffer to make 100 μl total volume. This is incubated for 4° C. for 30 mins then washed three times at 400×g. 10 different cell hashing samples are pooled in one tube with desired cell number (˜1000 cells/μl).

[0413] Single cells are processed through Chromium Next GEM Single Cell 3′ _Reagent Kit (Dual Index) (10× Genomics CG000317 Rev C) following the provided protocol from 10× Genomics. Briefly, samples are processed through GEM generation and barcoding, post GEM-RT Cleanup and cDNA amplification, 3′ gene expression library construction, cell surface protein library construction and finally sequencing.

[0414] Post sequencing, reads are aligned to the human reference genome (GENCODE34/GRCH38). Reads are demultiplexed using DNA-barcoded antibodies and run through quality control (g. doublets are removed, singlet cells are selected with less than 15% mitochondria contamination at RNA levels, and reads contain higher than 500 genes). The raw data is normalized. Principal component analysis is performed, and cell clusters are annotated. Differential gene expression analysis is performed between controls and treatment with target protein. Shifts in cell population dynamics observed by principal component analysis and/or shifts in gene expression post treatment with target protein in supernatant validates that target protein acts as a circulating factor.

[0415] SEQ ID NO: 6516 significantly blocks the IRF signal transduction pathway response from several TLRs. Up-regulation of the IRF pathway is linked to many autoimmune diseases, especially to lupus. Consistent with a connection to innate immune related diseases like lupus, SEQ ID NO: 6516 strongly affected active monocytes and dendritic cells while having relatively small effects on T-cells, B-cells, and NK-cells (FIG. 4, FIG. 5, FIG. 6A and FIG. 6B).

### Other Hits:

| Target Protein | Relative activity |
|---|---|
| SEQ ID NO: 1184 | +++ |

### Example 6: Validation of a Target Protein as a Cytokine Through Activation and Differentiation of Immune Cells

[0416] This example demonstrates the ability of a target protein to function as a cytokine by activating and/or differentiating immune cells, such as monocytes to macrophages. In this example, one or more target proteins of the disclosure (e.g., listed in the Sequence Listing) are ordered through GenScript Biotech (Piscataway, NJ). Peptides are synthesized through Fluorenylmethyloxycarbonyl (Fmoc) protection group chemistry using Solid Phase Peptide Synthesis (SPPS). Human monocytes (THP-1, ATCC) are cultured in RPMI 1640 media supplemented with HEPES buffer (10 mM), sodium pyruvate (1 mM), glucose (4.5 g/L), fetal bovine serum (10%), penicillin (100 U/mL), streptomycin (100 g/mL), and 2-mercaptoethanol (0.05 mM). Monocytes are treated with 1 g/mL LPS (Sigma-Aldrich) M-CSF and (50 ng/ml) for 24 hrs, 50 nMPMA (Sigma-Aldrich) for 72 hrs, target protein (final conc. 10 μM), or left untreated.

[0417] Untreated, LPS-treated, or target protein-treated cells are resuspended in 2 mL fresh culture medium at a cell concentration of 500,000 cells/mL and seeded into a 24-well TCPS plate. The plates are incubated for 24 hrs. After 24 hrs, the cells are loosened from the materials by mechanical dissociation and the cells are collected. Cells are counted on a hemocytometer using a Nikon Diaphot light microscope (Nikon, Melville, NY). Live cells are determined via trypan blue dye exclusion. Supernatants collected at 24 hrs are stored at −20° C. until analyzed for cytokine concentrations.

[0418] The PMA-treated cells are rinsed with PBS and detached with 4 mL of trypsin/EDTA (Clonetics, Walkersville, MD) per T-75 flask. The flask is incubated for 4 mins before adding 8 mL of trypsin neutralizing solution (TNS; Clonetics). The cells are then re-suspended and seeded onto materials in the same manner as the untreated and LPS-treated cells. At 24 hrs post-seeding, the supernatants are collected and stored at −20° C. The cells are then loosened from the materials using 260 μL of trypsin/well, incubating for 4 mins, and then adding 520 μL of TNS/well. Viable cells, determined by trypan blue dye exclusion, are counted on a hemocytometer via light microscopy.

[0419] In order to assess levels of monocyte differentiation, the expression of the cell surface marker CD11b, a marker of macrophage differentiation, is measured by flow cytometry. Untreated, LPS-treated, PMA-treated, or target protein-treated cells are detached as described above and fixed for 15 mins with 3.7% paraformaldehyde. The cells are then rinsed in PBS, incubated with 10% goat serum (blocking buffer; Sigma), and are incubated with 10 g/mL mouse anti-human CD11b (Becton Dickinson). Cells are again rinsed, then incubated with Alexa fluor 488 goat anti-mouse secondary antibody (Invitrogen), rinsed, and post-fixed in 10% formalin. Fluorescence intensity of the labeled cells is measured using a FACSCalibur flow cytometer (Becton Dickinson). At least 10,000 events are acquired per sample to determine the geometric mean fluorescence intensity. Supernatants collected from monocytes/macrophages seeded onto biomaterial surfaces are assayed for cytokines, including TNF-α, MCP-1, MIP-1α, IL-8, IL-10, IL-6, VEGF, IL-1ra, IL-10, IL-2, IL-4, IL-5, IL-7, IL-9, IL-12 (p70), IL-13, IL-15, IL-17, IFN-7, IP-10, G-CSF, and GM-CSF. Increased expression of these cytokines indicates that the target protein is pro-inflammatory, and decreased expression of these cytokines indicates that the target protein is anti-inflammatory.

### Example 7: Validation of a Target Protein as a Cytokine that is Mutated in Disease

[0420] This example demonstrates the ability of a target protein of the disclosure that is acting as a cytokine to drive an immunological disease. In this example, a target protein is mutated to contain a non-synonymous amino acid mutation (e.g. a gain-of-function variant) in the genome and subsequent transcript. To test whether the target protein variant causes disease, immune signaling and downstream NF-kB activation is assayed in human monocytes containing a NF-κB LuciaReporter (InvivoGen, #thp1-nfkb). The target protein is chemically synthesized containing the variant as well as a wildtype peptide. Human monocytes are cultured in RPMI 1640 media supplemented with HEPES buffer (10 mM), sodium pyruvate (1 mM), glucose (4.5 g/L), fetal bovine serum (10%), penicillin (100 U/mL), streptomycin (100 g/mL), and 2-mercaptoethanol (0.05 mM). Monocytes are treated with 1 g/mL LPS (Sigma-Aldrich) for 24 hrs, a target protein (final conc. 10 μM) variant, a wildtype target protein (final conc. 10 μM), or left untreated. The levels of NF-κB-induced Lucia in the cell culture supernatant are readily assessed with QUANTI-Luc, a luciferase detection reagent as described above. Increased reporter activity after treatment with target protein containing the variant is observed in cells where the target protein is immune stimulating, contributing to immunological over-activity in disease.

### Example 8. Validation of a Secreted Target Protein that Stimulates or Inhibits Cytokine Release

[0421] CBA (Cytometry) experiment looking at pro-inflammatory cytokines produced by PBMCs treated with secreted peptides.

[0422] This example demonstrates the validation of a Target Protein, SEQ ID NO: 3585, as an anti-inflammatory cytokine modulator, suitable for the treatment of autoimmune diseases such as Psoriasis, Arthritis, and Multiple Sclerosis.

[0423] Peripheral Blood Mononuclear Cells were seeded+/−the T-cell activator CD3/CD8 and +/−peptides for 24-48 hours. Cytokines were measured from the supernatant after incubation by CBA Cytometer.

### Materials and Methods

[0424] Thawing PBMCs: PBMCs were thawed by pre-warming TexMACS media (Miltenyi Biotech) in 20 ml aliquots-1-50 ml conical per donor. After the media was warmed to 37° C., cells were removed from liquid nitrogen and brought to the tissue culture hood. For each donor, 1 ml of media from the warmed aliquot was added to the frozen vial and mixed up and down. The media plus thawed cells were then added back to the 50 ml conical. This was repeated until all the cells were thawed and added to the 50 ml tube. Continue with other donors if used. Spin cells for 5 min at 400×g. Supernatant was aspirated and cells resuspended at ˜10*10\hat{ }6 cells/ml (see vial for cell number).

[0425] PBMC Plating: Frozen PBMCs from normal, healthy, human volunteers (StemCell Technologies) were thawed and plated at 250,000 cells/well. After PBMCs were thawed and resuspended at 10*0\hat{ }6 cells/ml, cells were then counted (Countess III, Thermo Scientific) and adjusted based on counts to 10*10\hat{ }6 cell/well. Take the number of PBMCs determined by number of wells for the experiment, for example, 10 wells would need 2.5*10\hat{ }6 cells total or 0.250 ml. The cells needed for the experiment are then transferred to another conical tube. Warmed TexMACS media is added so that the final concentration is 250,000 cells/190 ul media, for example, 10 wells would need 1.9 ml (190 ul×10 wells) of media total minus 0.250 ml of cells (1.9 ml-0.250 ml) or 1.65 ml of media added to the 0.250 ml of cells. Add 190 ul of cells plus media to the 96 well U-bottom plate. Place in incubator until dilutions are made and ready.

[0426] Peptide Dilutions: Ideally, all peptides should be at a starting concentration of at least 10 mM, especially for those in DMSO (ATCC) to reach a final concentration of 1 uM (H2O) or 0.5 uM (DMSO). Dilutions of all test articles should be made at 20× the final concentration, for example, a final concentration of 1 uM peptide would need to be made at 20 uM.

[0427] Reagent Dilution: Dilutions are made in TexMACS media, enough for 10 ul/well in triplicate (30 ul of a 20×). Activator—CD3/CD28 (TransAct; Miltenyi Biotech) or cytokine will be at 21× and added after the 45-minute incubation with peptides. Be sure to include relevant controls—Positive: TransAct+Cells, Negative: Vehicle+Cells. Dilutions should also be made in a ultra-low binding plate (Corning).

[0428] Assay Procedure: Peptide Treatment: Start assay by thawing the cells and plating in a 96 well, U-bottom tissue culture plate (Corning) as described above. Cell plates are placed in a tissue culture incubator (5% CO₂, 37° C.). While cells are in the incubator, start making dilutions (optimally 1 hr or less) as described above. Cell plates are removed from the incubator and 10 ul of the 20× dilutions are added to the relevant wells. After the addition of inhibitors, cell plates are placed in the tissue culture incubator for 45 minutes. The plates are removed from the incubator and 10 ul of 21× TransAct is added to the relevant wells*. Plates are then returned to the incubator and incubated for 24 hours. After 24 hours, plates are spun for 5 minutes at 400×g.

[0429] * Activation: This assay can be run in two different formats—Activation and Inhibition. The procedure is the same except no TransAct is needed in the peptide wells for Activation. TransAct is only needed in the control wells. The purpose of this procedure is to determine the possible response from peptides alone.

[0430] Cytometric BeadArray (CBA): After the spin, supernatants (˜150 ul) are transferred to a new, ultra-low binding U-bottom plate. Supernatants are then frozen at −20° C. until thawed for CBA (BD) to determine levels of human IL-2, TNFα, IL-1b, IP-10, IL-10, and IFNg. CBA was run according to the manufacturers protocol.

[0431] SEQ ID NO: 3585 significantly blocks the release of TNF-alpha from activated PBMCs but does not block the release of another inflammatory cytokine, IL-1b. Specific inhibition of TNF-alpha release will decrease the inflammatory response (FIG. 7, FIG. 8).

| | Activation by Analyte | | | | |
|---|---|---|---|---|---|
| | IL-2 | IL-1b | IP-10 | IL-10 | TNF |
| SEQ ID NO: 4615 | | | X | X | |
| SEQ ID NO: 5631 | | | X | | |
| SEQ ID NO: 6295 | | | X | | |
| SEQ ID NO: 5848 | X | | | | |
| SEQ ID NO: 5931 | | X | | | |
| SEQ ID NO: 6517 | | | X | | |
| SEQ ID NO: 3494 | | | X | | |
| SEQ ID NO: 3169 | | | X | | |
| SEQ ID NO: 3462 | | | X | | |
| SEQ ID NO: 4566 | | | X | | |
| SEQ ID NO: 5537 | | | X | | |
| SEQ ID NO: 5730 | | | X | | |
| | Inhibition by Analyte | | | | |
| | IL-2 | TNF | IL-1b | IP-10 | IL-10 |
| SEQ ID NO: 5862 | | | X | | |
| SEQ ID NO: 6518 | X | X | | | |
| SEQ ID NO: 5843 | | | X | | |
| SEQ ID NO: 4615 | | X | X | | |
| SEQ ID NO: 4174 | | X | X | X | |
| SEQ ID NO: 4174 | | | | | X |
| SEQ ID NO: 5627 | X | X | | | |
| SEQ ID NO: 3585 | X | X | X | | |
| SEQ ID NO: 1184 | X | X | X | X | |
| SEQ ID NO: 4524 | X | X | X | X | |

Table of Hits: X = a hit with significant activation or inhibition of relevant cytokine release. Inhibition occurs when the peptide is applied with anti-CD3/CD28 T-cell activator. Activation occurs when the peptide is applied to PBMCs alone (see Materials and Methods).
Significance = P = 0.05

### Example 9. Validation of a Target Protein Acting as an Inhibitor of Pro-Inflammatory Cytokine Activity

[0432] The present example demonstrates the validation of SEQ ID NO: 1238_L8V, SEQ ID NO: 4227, and SEQ ID NO: 6091 as novel peptides capable of inhibiting pro-inflammatory cytokine pathways for TL-4 and IL-15, and SEQ ID NO: 3915 as a novel peptide capable of activating the signaling pathway for IFN-alpha. These peptides may be suitable for the treatment of autoimmune diseases such as psoriasis, arthritis, and multiple sclerosis.

[0433] The effects of putative inhibitors on pro-inflammatory cytokine pathways are assessed using HEK-Blue cells engineered for the detection of bioactive cytokines via activation of JAK/STAT pathways and subsequent expression of the SEAP reporter gene. Cells are treated with their relevant cytokines+/−peptides or control antibodies, and 20 hours after treatment activation of the relevant cytokine receptor is determined via SEAP expression through mixing cell supernatants with a Quanti-Blue colorimetric reagent and measuring optical density at 600 nm.

### Methods and Materials

[0434] Reporter lines HEK-Blue TL-4/TL-15/IFN-alpha were cultured in DMEM with GlutaMAX and 10% HI FBS (Gibco). Cells were seeded into black 96-well optical clear flat-bottomed PhenoPlates at densities of 25000 cells/well and 100 uL/well and allowed to rest overnight in a 37 C incubator with 5% CO₂. After 24 hours, cells were treated with 10 μL of their relevant cytokines (StemCell Technologies) at the previously determined EC75 for activation (1.164 ng/mL for HEK-Blue IL-4, 2.26 ng/mL for HEK-Blue IL-15, and 0.456 ng/mL for HEK-Blue IFN-alpha), with or without 10 μL of peptides (5 uM final concentration) or control antibodies (1 ug/well). Cells were kept overnight in a 37 C incubator with 5% C02.

[0435] 20-22 hours after treatment, 20 μL of the cell supernatants were collected and transferred to 96-well white flat opaque-bottom plates (Costar) and each sample was mixed with 180 μL of Quanti-Blue reagent. Colorimetric reactions were allowed to develop in a 37 C incubator with 5% C02 for a certain duration of time (3 hours for HEK-Blue IL-4, 2 hours for HEK-Blue IL-15, and 1 hour for IFN-alpha). Assay plates were then removed from the incubator and the optical density of each well was measured at 600 nm on a GloMax plate reader. Relative activation of the cytokine signaling pathway in question was determined by ratioing the optical density of each sample to the average optical density for the cytokine-only treated cells from the same plate.

[0436] As seen in FIG. 9, peptides SEQ ID NO: 1238_L8V and SEQ ID NO: 4227 were confirmed as strong and moderate inhibitors, respectively, of the IL-4 signaling pathway. Peptide SEQ ID NO: 6091 was confirmed as a strong inhibitor of the IL-15 signaling pathway, as shown in FIG. 10, and peptide SEQ ID NO: 3915 was confirmed as moderate activator of the IFN-alpha signaling pathway, as shown in FIG. 11.

| | Relative activity | |
|---|---|---|
| | (compared to cytokine | |
| ORF ID | only controls) | Cytokine |
| SEQ ID NO: 1238_L8V | −70% | IL-15 |
| SEQ ID NO: 4227 | −50% | IL-4 |
| SEQ ID NO: 6091 | −40% | IL-4 |
| SEQ ID NO: 3915 | +40% | IFN-a |

### Example 10. Validation as a Target Protein Acting as a Cytokine on T-Cells

[0437] This example demonstrates the validation of a Target Protein, SEQ ID NO: 4524, acting as a cytokine on T cells. SEQ ID NO: 4524 is a novel, secreted peptide that enhances T cell activation. Thus, SEQ ID NO: 4524 is a T cell modulating cytokine and will be suitable as a drug target for the treatment of diseases caused by a pathological T cell response such as psoriasis, multiple sclerosis, and rheumatoid arthritis.

[0438] To determine the effect of the Target Protein on T cell activity, the Target Protein, irrelevant proteins, a single amino acid mutant Target Protein and controls were applied to primary human T cells isolated from Peripheral Blood Mononuclear Cells (PBMCs)+/−CD3/CD28. 24 hours later the levels of extra-cellular CD69, IL-2, and TNFalpha (72 hours for IFN-gamma) were evaluated.

### Materials and Methods

[0439] Isolation of PBMCfrom Leukopak: The isolation of peripheral blood mononuclear cells (PBMC) from a leukopak sample was conducted using the EasySep™ Direct Human PBMC Isolation Kit (Cat #19654, StemCell Technologies, Vancouver, BC, Canada) following the manufacturer's instructions. A leukopak sample was prepared within a volume range of 125 mL and added to a T-75 cm2 cell culture flask. EDTA was added to the sample to achieve a final concentration of 6 mM. The Isolation Cocktail provided in the kit was added to the sample without vortexing, and the sample was mixed and incubated at room temperature (RT) for 5 minutes. EasySep buffer was added to double the original sample volume, followed by the addition of vortexed RapidSpheres™. The flask was placed into a magnet and incubated at RT for 5 minutes. The cell suspension was carefully pipetted into a new T-75 cm2 flask, and RapidSpheres™ were added to the enriched cells. The flask was placed back into the magnet for a second separation at RT for 5 minutes. Finally, the cell suspension was carefully pipetted into a new tube or centrifuge bottle, and the isolated PBMCs were ready for use.

[0440] Isolation of primary human T-cells: Following the isolation of PBMCs, CD8⁺ T cells were isolated using the EasySep™ Human CD8⁺ T Cell Isolation Kit (Cat #17953, StemCell Technologies, Vancouver, BC, Canada) according to the manufacturer's instructions. The PBMC sample was prepared at a concentration of 5×10∂cells/mL within a volume range of 2 mL and added to a 5 mL polystyrene round-bottom tube. The Isolation Cocktail provided in the kit (50 μL/mL of sample) was added to the sample without vortexing, mixed, and incubated at RT for 5 minutes. RapidSpheres™ were vortexed for 30 seconds to ensure even dispersion and then added to the sample at a concentration of 50 μL/mL of sample. The EasySep buffer was added to top up the sample to a total volume of 2.5 mL, and the sample was mixed by gently pipetting up and down 2-3 times. The tube (without lid) was placed into the magnet and incubated at RT for 3 minutes. After incubation, the magnet was picked up, and in one continuous motion, the magnet and tube were inverted, pouring the enriched cell suspension into a new tube. The isolated CD8⁺ T cells were now ready for use.

[0441] Peptide treatment: Isolated CD8⁺ T cells were plated in a 96-well format plate at a density of 1×10\hat{ }5 cells per well. Each well was initially filled with 100 μl of ImmunoCult-XF T Cell Expansion Medium (StemCell Technologies). For T cell activation and peptide treatment, a secondary solution was prepared. This solution contained the CD3/CD28 antibody cocktail (StemCell Technologies) at a concentration of 25 μl per ml, and synthetic peptides, SEQ ID NO: 4524 or a scrambled control, from a 1 mM stock solution to achieve a final concentration of 10 μM. 100 μl of this secondary solution was added to each well, bringing the final volume in each well to 200 μl. Subsequent incubation was carried out under appropriate conditions.

[0442] ELISA: All reagents, working standards, and samples were prepared as instructed in Abcam ELISA kit manual. For each assay, 50 μL of undiluted sample or standard was added to the appropriate wells, followed by 50 μL of the Antibody Cocktail. The plate was sealed and incubated for 60 minutes at room temperature on a plate shaker set to 400 rpm. Following incubation, each well was washed three times with 350 μL of 1× Wash Buffer. Washing was performed by aspirating or decanting from the wells, then dispensing 350 μL of the 1× Wash Buffer into each well. After the final wash, the plate was inverted and gently tapped against clean paper towels to remove excess liquid. Subsequently, 100 μL of TMB Development Solution was added to each well. The plate was incubated for 10 minutes in the dark on a plate shaker set to 400 rpm. Finally, 100 μL of Stop Solution was added to each well. The plate was shaken on a plate shaker for 1 minute to ensure mixing. The optical density was recorded at 450 nm using a GloMax microplate reader (Promega), performing an endpoint reading.

[0443] Antibody staining for Flow cytometry analysis: After sample collection, cells were centrifuged at 600×g for 5 minutes. The supernatant was carefully discarded, and the cells were washed with 200 μl of Dulbecco's Phosphate Buffered Saline (DPBS). This was followed by another round of centrifugation at 600×g for 5 minutes, and the supernatant was again discarded.

[0444] For antibody staining, 100 μl of the prepared antibody (Anti-CD69, Invitrogen) staining solution (1:100 dilution in flow cytometry staining solution, eBioscience) was added to each well. The cells were then incubated for 30 minutes at 4° C., with the plates covered in foil to protect from light. After incubation, an additional 100 μl of DPBS was added to each well, and the samples were centrifuged at 600×g for 5 minutes. The supernatant was discarded, and the cells were washed once more with 200 μl of DPBS, followed by centrifugation at 600×g for 5 minutes. After discarding the supernatant, cells were fixed by adding 100 μl of fixation buffer (Becton Dickinson and Company) to each well, followed by incubation for 20 minutes at 4° C. Then, 100 μl of DPBS was added to each well, and the cells were centrifuged one final time at 600×g for 5 minutes. After discarding the supernatant, cells were resuspended in 110 μl of flow cytometry staining solution. The prepared samples were stored at 4° C., covered with aluminum foil, until further flow cytometry analysis. Flow cytometry was performed using the BD symphony A1 analyzer (Becton Dickinson and Company).

[0445] Monitoring of T-cell activation markers, TNFalpha, IL-2, CD69 and IFN-gamma: SEQ ID NO: 4524 significantly up-regulates T-cell activation markers CD69, IL-2, and TNFalpha. Interestingly, a single point mutation targeting Cysteine XXX completely abrogates its activity. Thus, SEQ ID NO: 4524 is acting as a cytokine that activates T-cells (FIG. 12, FIG. 13).

| ORF ID | Relative activity |
|---|---|
| SEQ ID NO: 4524 | +++ |
| SEQ ID NO: 3935 | + |
| SEQ ID NO: 6519 | ++ |
| SEQ ID NO: 5862 | ++++ |
| SEQ ID NO: 2758 | ++ |

[0446] The teachings of all patents, published applications and references cited herein are incorporated by reference in their entirety.

[0447] While example embodiments have been particularly shown and described, it will be understood by those skilled in the art that various changes in form and details may be made therein without departing from the scope of the embodiments encompassed by the appended claims.

What is claimed is:

1. An agent that comprises and/or modulates the expression or activity of a target protein identified in the Sequence Listing, or a variant thereof.

2. The agent of claim 1, wherein the agent comprises the target protein.

3. The agent of claim 1, wherein the agent modulates the expression of the target protein.

4. The agent of claim 2 or 3, wherein the agent modulates the expression of a gene or gene transcript encoding the target protein.

5. The agent of claim 1, wherein the agent modulates the activity of the target protein.

6. The agent of any one of claims 2-5, comprising a polypeptide, a polynucleotide, or a small molecule.

7. The agent of any one of claims 2-6, wherein the agent decreases the expression or activity of the target protein.

8. The agent of claim 7, wherein the agent comprises an inhibitor of the target protein.

9. The agent of claim 8, wherein the inhibitor is a polypeptide.

10. The agent of claim 9, wherein the polypeptide is an antagonist antibody, or an antigen-binding fragment thereof, that binds to the target protein.

11. The agent of claim 8, wherein the inhibitor is a polynucleotide.

12. The agent of claim 11, wherein the polynucleotide comprises a nucleotide sequence that is complementary to at least a portion of a gene or gene transcript encoding the target protein.

13. The agent of claim 11 or 12, wherein the polynucleotide comprises DNA.

14. The agent of claim 11 or 12, wherein the polynucleotide comprises RNA.

15. The agent of claim 11 or 12, wherein the polynucleotide is a small interfering RNA (siRNA), a short hairpin RNA (shRNA), an antisense DNA, an antisense RNA, a microRNA (miRNA), an antagomir, a guide RNA (gRNA), a locked nucleic acid (LNA) or a morpholino nucleic acid (MNA).

16. The agent of claim 8, wherein the inhibitor is a small molecule.

17. The agent of claim 16, wherein the small molecule binds to the target protein, thereby decreasing the activity of the target protein.

18. The agent of any one of claims 1-6, wherein the agent increases the expression or activity of the target protein.

19. The agent of claim 18, wherein the agent is an isolated polypeptide comprising the amino acid sequence of the target protein, or a variant thereof comprising an amino acid sequence having at least 80% sequence identity to the amino acid sequence of the target protein.

20. The agent of claim 19, wherein the isolated polypeptide or variant thereof is a recombinant protein or a synthetic protein.

21. The agent of claim 18, wherein the agent is a polynucleotide encoding the target protein or a variant thereof having at least 80% sequence identity to the amino acid sequence of the target protein.

22. The agent of claim 21, wherein the polynucleotide comprises DNA.

23. The agent of claim 21 or 22, wherein the polynucleotide comprises a vector.

24. The agent of claim 21, wherein the polynucleotide comprises RNA.

25. The agent of claim 24, wherein the RNA is messenger RNA (mRNA) and/or circular RNA (circRNA).

26. The agent of claim 18, wherein the agent comprises an activator of the target protein.

27. The agent of claim 26, wherein the activator is a polypeptide.

28. The agent of claim 27, wherein the polypeptide is an agonist antibody, or an antigen-binding fragment thereof, that binds to the target protein.

29. The agent of claim 26, wherein the activator is a small molecule.

30. The agent of claim 29, wherein the small molecule binds to the target protein, thereby increasing the activity of the target protein.

31. The agent of any one of claims 1-8, 18 and 26, comprising a gene editing system.

32. The agent of claim 31, wherein the gene editing system is a CRISPR/Cas system, a transposon-based gene editing system, and a transcription activator-like effector nuclease (TALEN) system.

33. The agent of any one of claims 1-32, wherein the target protein is translated from a non-coding RNA.

34. The agent of claim 33, wherein the non-coding RNA is a long intergenic non-coding RNA (lincRNA).

35. The agent of any one of claims 1-32, wherein the target protein is translated from a non-exonic element in an unprocessed precursor mRNA (pre-mRNA).

36. The agent of claim 35, wherein the non-exonic element is an intron in a pre-mRNA.

37. The agent of claim 35, wherein the non-exonic element is a 5′-untranslated region (5′-UTR) in a pre-mRNA.

38. The agent of claim 35, wherein the non-exonic element is a 3′-untranslated region (3′-UTR) in a pre-mRNA.

39. A pharmaceutical composition comprising the agent of any one of claims 1-38, and a pharmaceutically acceptable carrier.

40. The pharmaceutical composition of claim 39, wherein the pharmaceutically acceptable carrier is a vector.

41. A method for modulating the expression or activity of a target protein identified in the Sequence Listing, or a variant thereof in a cell, comprising contacting the cell with the agent of any one of claims 1-38 or the pharmaceutical composition of claim 39 or 40.

42. The method of claim 41, wherein the agent decreases the expression or activity of the target protein in the cell.

43. The method of claim 41, wherein the agent increases the expression or activity of the target protein in the cell.

44. The method of any one of claims 41-43, wherein the cell is in a subject, and wherein the cell is:
a) a cancer cell, a cell in a tumor micro-environment, or a combination thereof;
b) an epithelial cell, an endothelial cell, a stem cell, a non-immune cell, or a combination thereof;
c) an immune cell (e.g., a macrophage, a lymphocyte such as a helper T cell), or a combination of the foregoing.

45. The method of claim 44, wherein the subject has a disease or condition selected from aging, senescence, fibrosis, autoimmunity, cancer, an infection, an immunological disease, or a combination thereof.

46. The method of any one of claims 41-45, wherein the agent modulates the expression or activity of the target protein by at least 10%.

47. The method of any one of claims 41-46, wherein the agent modulates the expression of a gene encoding the target protein by at least 10%, thereby modulating the expression or activity of the target protein.

48. A method of predicting a likelihood of developing a disease or condition in a subject, comprising quantifying an expression or activity of a target protein identified in the Sequence Listing in a sample from the subject, wherein the level of expression or activity of the target protein in the sample is indicative of the likelihood of developing cancer in the subject, wherein the disease or condition is selected from aging, senescence, fibrosis, autoimmunity, cancer, an infection, an immunological disease, or a combination thereof.

49. A method of preparing a sample that is useful for detecting a likelihood of developing a disease or condition in a subject, comprising:
a) obtaining or having obtained a sample from the subject;
b) adding a protease inhibitor, a control peptide, a standard peptide, or a combination thereof to the sample to prepare a sample that is useful for detecting a likelihood of developing cancer; and
c) quantifying an expression or activity of a target protein identified in the Sequence Listing in the sample prepared in step b),
wherein the disease or condition is selected from inflammation, aging, senescence, fibrosis, autoimmunity, cancer, an infection, an immunological disease, or a combination thereof.

50. The method of claim 48 or 49, further comprising administering to the subject an effective amount of the agent of any one of claims 1-38, or the pharmaceutical composition of claim 39 or 40 if the subject is predicted to have a likelihood of developing cancer.

51. A method of treating a disease or condition in a subject in need thereof, comprising administering to the subject an effective amount of the agent of any one of claims 1-38, or the pharmaceutical composition of claim 39 or 40, wherein the disease or condition is selected from inflammation, aging, senescence, fibrosis, autoimmunity, cancer, an infection, an immunological disease, or a combination thereof.

52. A method for identifying an agent that modulates the expression or activity of a target protein identified in the Sequence Listing, or a variant thereof, comprising:
a) contacting a protein identified in the Sequence Listing, or a variant thereof with an agent; and
b) determining whether the agent modulates the expression or activity of the target protein,
wherein a difference in the expression or activity of the target protein that has been contacted with the agent compared to a reference for the expression or activity of the target protein indicates that the agent modulates the expression or activity of the target protein.

53. The method of claim 52, wherein a difference of at least 10% in the expression or activity of the target protein that has been contacted with the agent compared to the reference indicates that the agent modulates the expression or activity of the target protein.

54. The method of claim 52 or 53, wherein a decrease in the expression or activity of the target protein that has been contacted with the agent compared to the reference indicates the agent inhibits the expression or activity of the target protein.

55. The method of claim 52 or 53, wherein an increase in the expression or activity of the target protein compared to the reference indicates the agent activates the expression or activity of the target protein.

The application's sequence listing, which the Patent Office published only in electronic form, follows.

SEQUENCE LISTING (6520 sequences)

SEQ ID NO: 1 - protein, 458 aa, Homo sapiens
MNRGVPFRHLLLVLQLALLPAATQGKKVVLGKKGDTVELTCTASQKKSIQFHWKNSNQIKILGNQGSFLTKGPSKLNDRADSRRSLWDQGNFPLIIKNLKIEDSDTYICEVEDQKEEVQLLVFGLTANSDTHLLQGQSLTLTLESPPGSSPSVQCRSPRGKNIQGGKTLSVSQLELQDSGTWTCTVLQNQKKVEFKIDIVVLAFQKASSIVYKKEGEQVEFSFPLAFTVEKLTGSGELWWQAERASSSKSWITFDLKNKEVSVKRVTQDPKLQMGKKLPLHLTLPQALPQYAGSGNLTLALEAKTGKLHQEVNLVVMRATQLQKNLTCEVWGPTSPKLMLSLKLENKEAKVSKREKAVWVLNPEAGMWQCLLSDSGQVLLESNIKVLPTWSTPVQPMALIVLGGVAGLLLFIGLGIFFCVRCRHRRRQAERMSQIKRLLSEKKTCQCPHRFQKTCSPI

SEQ ID NO: 2 - protein, 694 aa, Homo sapiens
MKHLKRWWSAGGGLLHLTLLLSLAGLRVDLDLYLLLPPPTLLQDELLFLGGPASSAYALSPFSASGGWGRAGHLHPKGRELDPAAPPEGQLLREVRALGVPFVPRTSVDAWLVHSVAAGSADEAHGLLGAAAASSTGGAGASVDGGSQAVQGGGGDPRAARSGPLDAGEEEKAPAEPTAQVPDAGGCASEENGVLREKHEAVDHSSQHEENEERVSAQKENSLQQNDDDENKIAEKPDWEAEKTTESRNERHLNGTDTSFSLEDLFQLLSSQPENSLEGISLGDIPLPGSISDGMNSSAHYHVNFSQAISQDVNLHEAILLCPNNTFRRDPTARTSQSQEPFLQLNSHTTNPEQTLPGTNLTGFLSPVDNHMRNLTSQDLLYDLDINIFDEINLMSLATEDNFDPIDVSQLFDEPDSDSGLSLDSSHNNTSVIKSNSSHSVCDEGAIGYCTDHESSSHHDLEGAVGGYYPEPSKLCHLDQSDSDFHGDLTFQHVFHNHTYHLQPTAPESTSEPFPWPGKSQKIRSRYLEDTDRNLSRDEQRAKALHIPFSVDEIVGMPVDSFNSMLSRYYLTDLQVSLIRDIRRRGKNKVAAQNCRKRKLDIILNLEDDVCNLQAKKETLKREQAQCNKAINIMKQKLHDLYHDIFSRLRDDQGRPVNPNHYALQCTHDGSILIVPKELVASGHKKETQKGKRK

SEQ ID NO: 3 - protein, 535 aa, Homo sapiens
MKLWVSALLMAWFGVLSCVQAEFFTSIGHMTDLIYAEKELVQSLKEYILVEEAKLSKIKSWANKMEALTSKSAADAEGYLAHPVNAYKLVKRLNTDWPALEDLVLQDSAAGFIANLSVQRQFFPTDEDEIGAAKALMRLQDTYRLDPGTISRGELPGTKYQAMLSVDDCFGMGRSAYNEGDYYHTVLWMEQVLKQLDAGEEATTTKSQVLDYLSYAVFQLGDLHRALELTRRLLSLDPSHERAGGNLRYFEQLLEEEREKTLTNQTEAELATPEGIYERPVDYLPERDVYESLCRGEGVKLTPRRQKRLFCRYHHGNRAPQLLIAPFKEEDEWDSPHIVRYYDVMSDEEIERIKEIAKPKLARATVRDPKTGVLTVASYRVSKSSWLEEDDDPVVARVNRRMQHITGLTVKTAELLQVANYGVGGQYEPHFDFSRNDERDTFKHLGTGNRVATFLNYMSDVEAGGATVFPDLGAAIWPKKGTAVFWYNLLRSGEGDYRTRHAACPVLVGCKWVSNKWFHERGQEFLRPCGSTEVD

SEQ ID NO: 4 - protein, 525 aa, Homo sapiens
MWEAQFLGLLFLQPLWVAPVKPLQPGAEVPVVWAQEGAPAQLPCSPTIPLQDLSLLRRAGVTWQHQPDSGPPAAAPGHPLAPGPHPAAPSSWGPRPRRYTVLSVGPGGLRSGRLPLQPRVQLDERGRQRGDFSLWLRPARRADAGEYRAAVHLRDRALSCRLRLRLGQASMTASPPGSLRASDWVILNCSFSRPDRPASVHWFRNRGQGRVPVRESPHHHLAESFLFLPQVSPMDSGPWGCILTYRDGFNVSIMYNLTVLGLEPPTPLTVYAGAGSRVGLPCRLPAGVGTRSFLTAKWTPPGGGPDLLVTGDNGDFTLRLEDVSQAQAGTYTCHIHLQEQQLNATVTLAIITVTPKSFGSPGSLGKLLCEVTPVSGQERFVWSSLDTPSQRSFSGPWLEAQEAQLLSQPWQCQLYQGERLLGAAVYFTELSSPGAQRSGRAPGALPAGHLLLFLILGVLSLLLLVTGAFGFHLWRRQWRPRRFSALEQGIHPPQAQSKIEELEQEPEPEPEPEPEPEPEPEPEQL

SEQ ID NO: 5 - protein, 252 aa, Homo sapiens
MGVLLTQRTLLSLVLALLFPSMASMAAIGSCSKEYRVLLGQLQKQTDLMQDTSRLLDPYIRIQGLDVPKLREHCRERPGAFPSEETLRGLGRRGFLQTLNATLGCVLHRLADLEQRLPKAQDLERSGLNIEDLEKLQMARPNILGLRNNIYCMAQLLDNSDTAEPTKAGRGASQPPTPTPASDAFQRKLEGCRFLHGYHRFMHSVGRVFSKWGESPNRSRRHSPHQALRKGVRRTRPSRKGKRLMTRGQLPR

SEQ ID NO: 6 - protein, 263 aa, Homo sapiens
MLLAWVQAFLVSNMLLAEAYGSGGCFWDNGHLYREDQTSPAPGLRCLNWLDAQSGLASAPVSGAGNHSYCRNPDEDPRGPWCYVSGEAGVPEKRPCEDLRCPETTSQALPAFTTEIQEASEGPGADEVQVFAPANALPARSEAAAVQPVIGISQRVRMNSKEKKDLGTLGYVLGITMMVIIIAIGAGIILGYSYKRGKDLKEQHDQKVCEREMQRITLPLSAFTNPTCEIVDEKTVVVHTSQTPVDPQEGTTPLMGQAGTPGA

SEQ ID NO: 7 - protein, 684 aa, Homo sapiens
MGLSAAAPLWGPPGLLLAIALHPALSVPPRRDYCVLGAGPAGLQMAYFLQRAGRDYAVFERAPRPGSFFTRYPRHRKLISINKRYTGKANAEFNLRHDWNSLLSHDPRLLFRHYSRAYFPDARDMVRYLGDFADTLGLRVQYNTTIAHVTLDKDRQAWNGHYFILTDQKGQVHQCSVLFVATGLSVPNQVDFPGSEYAEGYESVSVDPEDFVGQNVLILGRGNSAFETAENILGVTNFIHMLSRSRVRLSWATHYVGDLRAINNGLLDTYQLKSLDGLLESDLTDLAILKDSKGKFHVTPKFFLEEANTNQSADSITLPQDDNDNFAMRVPYDRVIRCLGWNFDFSIFNKSLRLNSGNAFGKKYPLIRASYESKGSRGLFILGTASHSVDYRKSAGGFIHGFRYTVRAVHRLLEHRHHSVTWPATELPITQLTSSIVRRVNEASGLYQMFGVLADVILLKENSTAFEYLEEFPIQMLAQLETLTGRKAKHGLFVINMEYGRNFSGPDKDVFFDDRSVGHTEDAWQSNFLHPVIYYYRYLPTEQEVRFRPAHWPLPRPTAIHHIVEDFLTDWTAPIGHILPLRRFLENCLDTDLRSFYAESCFLFALTRQKLPPFCQQGYLRMQGLVSTESLWQHRVESRLLRDYAPTGRRLEDSSQQLGDQEPLGSPLAPGPLAQSVDSNKEEL

SEQ ID NO: 8 - protein, 246 aa, Homo sapiens
MQPFLLLLAFLLTPGAGTEEIIGGHEAKPHSRPYMAFVQFLQEKSRKRCGGILVRKDFVLTAAHCQGSSINVTLGAHNIKEQERTQQFIPVKRPIPHPAYNPKNFSNDIMLLQLERKAKWTTAVRPLRLPSSKAQVKPGQLCSVAGWGYVSMSTLATTLQEVLLTVQKDCQCERLFHGNYSRATEICVGDPKKTQTGFKGDSGGPLVCKDVAQGILSYGNKKGTPPGVYIKVSHFLPWIKRTMKRL

SEQ ID NO: 9 - protein, 247 aa, Homo sapiens
MQPILLLLAFLLLPRADAGEIIGGHEAKPHSRPYMAYLMIWDQKSLKRCGGFLIRDDFVLTAAHCWGSSINVTLGAHNIKEQEPTQQFIPVKRPIPHPAYNPKNFSNDIMLLQLERKAKRTRAVQPLRLPSNKAQVKPGQTCSVAGWGQTAPLGKHSHTLQEVKMTVQEDRKCESDLRHYYDSTIELCVGDPEIKKTSFKGDSGGPLVCNKVAQGIVSYGRNNGMPPRACTKVSSFVHWIKKTMKRY

SEQ ID NO: 10 - protein, 276 aa, Homo sapiens
MPVPASWPHPPGPFLLLTLLLGLTEVAGEEELQMIQPEKLLLVTVGKTATLHCTVTSLLPVGPVLWFRGVGPGRELIYNQKEGHFPRVTTVSDLTKRNNMDFSIRISSITPADVGTYYCVKFRKGSPENVEFKSGPGTEMALGAKPSAPVVLGPAARTTPEHTVSFTCESHGFSPRDITLKWFKNGNELSDFQTNVDPTGQSVAYSIRSTARVVLDPWDVRSQVICEVAHVTLQGDPLRGTANLSEAIRGPASSLTALLLIAVLLGPIYVPWKQKT

SEQ ID NO: 11 - protein, 387 aa, Homo sapiens
MVFAFWKVFLILSCLAGQVSVVQVTIPDGFVNVTVGSNVTLICIYTTTVASREQLSIQWSFFHKKEMEPISIYFSQGGQAVAIGQFKDRITGSNDPGNASITISHMQPADSGIYICDVNNPPDFLGQNQGILNVSVLVKPSKPLCSVQGRPETGHTISLSCLSALGTPSPVYYWHKLEGRDIVPVKENFNPTTGILVIGNLTNFEQGYYQCTAINRLGNSSCEIDLTSSHPEVGIIVGALIGSLVGAAIIISVVCFARNKAKAKAKERNSKTIAELEPMTKINPRGESEAMPREDATQLEVTLPSSIHETGPDTIQEPDYEPKPTQEPAPEPAPGSEPMAVPDLDIELELEPETQSELEPEPEPEPESEPGVVVEPLSEDEKGVVKA

SEQ ID NO: 12 - protein, 207 aa, Homo sapiens
MAPFEPLASGILLLLWLIAPSRACTCVPPHPQTAFCNSDLVIRAKFVGTPEVNQTTLYQRYEIKMTKMYKGFQALGDAADIRFVYTPAMESVCGYFHRSHNRSEEFLIAGKLQDGLLHITTCSFVAPWNSLSLAQRRGFTKTYTVGCEECTVFPCLSIPCKLQSGTHCLWTDQLLQGSEKGFQSRHLACLPREPGLCTWQSLRSQIA

SEQ ID NO: 13 - protein, 93 aa, Homo sapiens
MDRLQTALLVVLVLLAVALQATEAGPYGANMEDSVCCRDYVRYRLPLRVVKHFYWTSDSCPRPGVVLLTFRDKEICADPRVPWVKMILNKLSQ

SEQ ID NO: 14 - protein, 229 aa, Homo sapiens
MTPQLLLALVLWASCPPCSGRKGPPAALTLPRVQCRASRYPIAVDCSWTLPPAPNSTSPVSFIATYRLGMAARGHSWPCLQQTPTSTSCTITDVQLFSMAPYVLNVTAVHPWGSSSSFVPFITEHIIKPDPPEGVRLSPLAERQLQVQWEPPGSWPFPEIFSLKYWIRYKRQGAARFHRVGPIEATSFILRAVRPRARYYVQVAAQDLTDYGELSDWSLPATATMSLGK

SEQ ID NO: 15 - protein, 728 aa, Homo sapiens
MWVTKLLPALLLQHVLLHLLLLPIAIPYAEGQRKRRNTIHEFKKSAKTTLIKIDPALKIKTKKVNTADQCANRCTRNKGLPFTCKAFVFDKARKQCLWFPFNSMSSGVKKEFGHEFDLYENKDYIRNCIIGKGRSYKGTVSITKSGIKCQPWSSMIPHEHSFLPSSYRGKDLQENYCRNPRGEEGGPWCFTSNPEVRYEVCDIPQCSEVECMTCNGESYRGLMDHTESGKICQRWDHQTPHRHKFLPERYPDKGFDDNYCRNPDGQPRPWCYTLDPHTRWEYCAIKTCADNTMNDTDVPLETTECIQGQGEGYRGTVNTIWNGIPCQRWDSQYPHEHDMTPENFKCKDLRENYCRNPDGSESPWCFTTDPNIRVGYCSQIPNCDMSHGQDCYRGNGKNYMGNLSQTRSGLTCSMWDKNMEDLHRHIFWEPDASKLNENYCRNPDDDAHGPWCYTGNPLIPWDYCPISRCEGDTTPTIVNLDHPVISCAKTKQLRVVNGIPTRTNIGWMVSLRYRNKHICGGSLIKESWVLTARQCFPSRDLKDYEAWLGIHDVHGRGDEKCKQVLNVSQLVYGPEGSDLVLMKLARPAVLDDFVSTIDLPNYGCTIPEKTSCSVYGWGYTGLINYDGLLRVAHLYIMGNEKCSQHHRGKVTLNESEICAGAEKIGSGPCEGDYGGPLVCEQHKMRMVLGVIVPGRGCAIPNRPGIFVRVAYYAKWIHKIILTYKVPQS

SEQ ID NO: 16 - protein, 185 aa, Homo sapiens
MPRLFLFHLLEFCLLLNQFSRAVAAKWKDDVIKLCGRELVRAQIAICGMSTWSKRSLSQEDAPQTPRPVAEIVPSFINKDTETIIIMLEFIANLPPELKAALSERQPSLPELQQYVPALKDSNLSFEEFKKLIRNRQSEAADSNPSELKYLGLDTHSQKKRRPYVALFEKCCLIGCTKRSLAKYC

SEQ ID NO: 17 - protein, 3354 aa, Homo sapiens
MGRHVATSCHVAWLLVLISGCWGQVNRLPFFTNHFFDTYLLISEDTPVGSSVTQLLAQDMDNDPLVFGVSGEEASRFFAVEPDTGVVWLRQPLDRETKSEFTVEFSVSDHQGVITRKVNIQVGDVNDNAPTFHNQPYSVRIPENTPVGTPIFIVNATDPDLGAGGSVLYSFQPPSQFFAIDSARGIVTVIRELDYETTQAYQLTVNATDQDKTRPLSTLANLAIIITDVQDMDPIFINLPYSTNIYEHSPPGTTVRIITAIDQDKGRPRGIGYTIVSGNTNSIFALDYISGVLTLNGLLDRENPLYSHGFILTVKGTELNDDRTPSDATVTTTFNILVIDINDNAPEFNSSEYSVAITELAQVGFALPLFIQVVDKDENLGLNSMFEVYLVGNNSHHFIISPTSVQGKADIRIRVAIPLDYETVDRYDFDLFANESVPDHVGYAKVKITLINENDNRPIFSQPLYNISLYENVTVGTSVLTVLATDNDAGTFGEVSYFFSDDPDRFSLDKDTGLIMLIARLDYELIQRFTLTIIARDGGGEETTGRVRINVLDVNDNVPTFQKDAYVGALRENEPSVTQLVRLRATDEDSPPNNQITYSIVSASAFGSYFDISLYEGYGVISVSRPLDYEQISNGLIYLTVMAMDAGNPPLNSTVPVTIEVFDENDNPPTFSKPAYFVSVVENIMAGATVLFLNATDLDRSREYGQESIIYSLEGSTQFRINARSGEITTTSLLDRETKSEYILIVRAVDGGVGHNQKTGIATVNITLLDINDNHPTWKDAPYYINLVEMTPPDSDVTTVVAVDPDLGENGTLVYSIQPPNKFYSLNSTTGKIRTTHAMLDRENPDPHEAELMRKIVVSVTDCGRPPLKATSSATVFVNLLDLNDNDPTFQNLPFVAEVLEGIPAGVSIYQVVAIDLDEGLNGLVSYRMPVGMPRMDFLINSSSGVVVTTTELDRERIAEYQLRVVASDAGTPTKSSTSTLTIHVLDVNDETPTFFPAVYNVSVSEDVPREFRVVWLNCTDNDVGLNAELSYFITGGNVDGKFSVGYRDAVVRTVVGLDRETTAAYMLILEAIDNGPVGKRHTGTATVFVTVLDVNDNRPIFLQSSYEASVPEDIPEGHSILQLKATDADEGEFGRVWYRILHGNHGNNFRIHVSNGLLMRGPRPLDRERNSSHVLIVEAYNHDLGPMRSSVRVIVYVEDINDEAPVFTQQQYSRLGLRETAGIGTSVIVVQATDRDSGDGGLVNYRILSGAEGKFEIDESTGLIITVNYLDYETKTSYMMNVSATDQAPPFNQGFCSVYITLLNELDEAVQFSNASYEAAILENLALGTEIVRVQAYSIDNLNQITYRFNAYTSTQAKALFKIDAITGVITVQGLVDREKGDFYTLTVVADDGGPKVDSTVKVYITVLDENDNSPRFDFTSDSAVSIPEDCPVGQRVATVKAWDPDAGSNGQVVFSLASGNIAGAFEIVTTNDSIGEVFVARPLDREELDHYILQVVASDRGTPPRKKDHILQVTILDINDNPPVIESPFGYNVSVNENVGGGTAVVQVRATDRDIGINSVLSYYITEGNKDMAFRMDRISGEIATRPAPPDRERQSFYHLVATVEDEGTPTLSATTHVYVTIVDENDNAPMFQQPHYEVLLDEGPDTLNTSLITIQALDLDEGPNGTVTYAIVAGNIVNTFRIDRHMGVITAAKELDYEISHGRYTLIVTATDQCPILSHRLTSTTTVLVNVNDINDNVPTFPRDYEGPFEVTEGQPGPRVWTFLAHDRDSGPNGQVEYSIMDGDPLGEFVISPVEGVLRVRKDVELDRETIAFYNLTICARDRGMPPLSSTMLVGIRVLDINDNDPVLLNLPMNITISENSPVSSFVAHVLASDADSGCNARLTFNITAGNRERAFFINATTGIVTVNRPLDRERIPEYKLTISVKDNPENPRIARRDYDLLLIFLSDENDNHPLFTKSTYQAEVMENSPAGTPLTVLNGPILALDADQDIYAVVTYQLLGAQSGLFDINSSTGVVTVRSGVIIDREAFSPPILELLLLAEDIGLLNSTAHLLITILDDNDNRPTFSPATLTVHLLENCPPGFSVLQVTATDEDSGLNGELVYRIEAGAQDRFLIHLVTGVIRVGNATIDREEQESYRLTVVATDRGTVPLSGTAIVTILIDDINDSRPEFLNPIQTVSVLESAEPGTVIANITAIDHDLNPKLEYHIVGIVAKDDTDRLVPNQEDAFAVNINTGSVMVKSPMNRELVATYEVTLSVIDNASDLPERSVSVPNAKLTVNVLDVNDNTPQFKPFGITYYMERILEGATPGTTLIAVAAVDPDKGLNGLVTYTLLDLVPPGYVQLEDSSAGKVIANRTVDYEEVHWLNFTVRASDNGSPPRAAEIPVYLEIVDINDNNPIFDQPSYQEAVFEDVPVGTIILTVTATDADSGNFALIEYSLGDGESKFAINPTTGDIYVLSSLDREKKDHYILTALAKDNPGDVASNRRENSVQVVIQVLDVNDCRPQFSKPQFSTSVYENEPAGTSVITMMATDQDEGPNGELTYSLEGPGVEAFHVDMDSGLVTTQRPLQSYEKFSLTVVATDGGEPPLWGTTMLLVEVIDVNDNRPVFVRPPNGTILHIREEIPLRSNVYEVYATDKDEGLNGAVRYSFLKTAGNRDWEFFIIDPISGLIQTAQRLDRESQAVYSLILVASDLGQPVPYETMQPLQVALEDIDDNEPLFVRPPKGSPQYQLLTVPEHSPRGTLVGNVTGAVDADEGPNAIVYYFIAAGNEEKNFHLQPDGCLLVLRDLDREREAIFSFIVKASSNRSWTPPRGPSPTLDLVADLTLQEVRVVLEDINDQPPRFTKAEYTAGVATDAKVGSELIQVLALDADIGNNSLVFYSILAIHYFRALANDSEDVGQVFTMGSMDGILRTFDLFMAYSPGYFVVDIVARDLAGHNDTAIIGIYILRDDQRVKIVINEIPDRVRGFEEEFIHLLSNITGAIVNTDNVQFHVDKKGRVNFAQTELLIHVVNRDTNRILDVDRVIQMIDENKEQLRNLFRNYNVLDVQPAISVRLPDDMSALQMAIIVLAILLFLAAMLFVLMNWYYRTVHKRKLKAIVAGSAGNRGFIDIMDMPNTNKYSFDGANPVWLDPFCRNLELAAQAEHEDDLPENLSEIADLWNSPTRTHGTFGREPAAVKPDDDRYLRAAIQEYDNIAKLGQIIREGPIKGSLLKVVLEDYLRLKKLFAQRMVQKASSCHSSISELIQTELDEEPGDHSPGQGSLRFRHKPPVELKGPDGIHVVHGSTGTLLATDLNSLPEEDQKGLGRSLETLTAAEATAFERNARTESAKSTPLHKLRDVIMETPLEITEL

SEQ ID NO: 18 - protein, 96 aa, Homo sapiens
MQIITTALVCLLLAGMWPEDVDSKSMQVPFSRCCFSFAEQEIPLRAILCYRNTSSICSNEGLIFKLKRGKEACALDTVGWVQRHRKMLRHCPSKRK

SEQ ID NO: 19 - protein, 153 aa, Homo sapiens
MYRMQLLSCIALSLALVTNSAPTSSSTKKTQLQLEHLLLDLQMILNGINNYKNPKLTRMLTFKFYMPKKATELKHLQCLEEELKPLEEVLNLAQSKNFHLRPRDLISNINVIVLELKGSETTFMCEYADETATIVEFLNRWITFCQSIISTLT

SEQ ID NO: 20 - protein, 393 aa, Homo sapiens
MWWRVLSLLAWFPLQEASLTNHTETITVEEGQTLTLKCVTSLRKNSSLQWLTPSGFTIFLNEYPALKNSKYQLLHHSANQLSITVPNVTLQDEGVYKCLHYSDSVSTKEVKVIVLATPFKPILEASVIRKQNGEEHVVLMCSTMRSKPPPQITWLLGNSMEVSGGTLHEFETDGKKCNTTSTLIIHTYGKNSTVDCIIRHRGLQGRKLVAPFRFEDLVTDEETASDALERNSLSSQDPQQPTSTVSVTEDSSTSEIDKEEKEQTTQDPDLTTEANPQYLGLARKKSGILLLTLVSFLIFILFIIVQLFIMKLRKAHVIWKKENEVSEHTLESYRSRSNNEETSSEEKNGQSSHPMRCMNYITKLYSEAKTKRKENVQHSKLEEKHIQVPESIV

SEQ ID NO: 21 - protein, 578 aa, Homo sapiens
MLPCLVVLLAALLSLRLGSDAHGTELPSPPSVWFEAEFFHHILHWTPIPNQSESTCYEVALLRYGIESWNSISNCSQTLSYDLTAVTLDLYHSNGYRARVRAVDGSRHSNWTVTNTRFSVDEVTLTVGSVNLEIHNGFILGKIQLPRPKMAPANDTYESIFSHFREYEIAIRKVPGNFTFTHKKVKHENFSLLTSGEVGEFCVQVKPSVASRSNKGMWSKEECISLTRQYFTVTNVIIFFAFVLLLSGALAYCLALQLYVRRRKKLPSVLLFKKPSPFIFISQRPSPETQDTIHPLDEEAFLKVSPELKNLDLHGSTDSGFGSTKPSLQTEEPQFLLPDPHPQADRTLGNREPPVLGDSCSSGSSNSTDSGICLQEPSLSPSTGPTWEQQVGSNSRGQDDSGIDLVQNSEGRAGDTQGGSALGHHSPPEPEVPGEEDPAAVAFQGYLRQTRCAEEKATKTGCLEEESPLTDGLGPKFGRCLVDEAGLHPPALAKGYLKQDPLEMTLASSGAPTGQWNQPTEEWSLLALSSCSDLGISDWSFAHDLAPLGCVAAPGGLLGSFNSDLVTLPLISSLQSSE

SEQ ID NO: 22 - protein, 189 aa, Homo sapiens
MLGSRAVMLLLLLPWTAQGRAVPGGSSPAWTQCQQLSQKLCTLAWSAHPLVGHMDLREEGDEETTNDVPHIQCGDGCDPQGLRDNSQFCLQRIHQGLIFYEKLLGSDIFTGEPSLLPDSPVGQLHASLLGLSQLLQPEGHHWETQQIPSLSPSQPWQRLLLRFKILRSLQAFVAVAARVFAHGAATLSP

SEQ ID NO: 23 - protein, 171 aa, Homo sapiens
MLVNFILRCGLLLVTLSLAIAKHKQSSFTKSCYPRGTLSQAVDALYIKAAWLKATIPEDRIKNIRLLKKKTKKQFMKNCQFQEQLLSFFMEDVFGQLQLQGCKKIRFVEDFHSLRQKLSHCISCASSAREMKSITRMKRIFYRIGNKGIYKAISELDILLSWIKKLLESSQ

SEQ ID NO: 24 - protein, 166 aa, Homo sapiens
MKYTSYILAFQLCIVLGSLGCYCQDPYVKEAENLKKYFNAGHSDVADNGTLFLGILKNWKEESDRKIMQSQIVSFYFKLFKNFKDDQSIQKSVETIKEDMNVKFFNSNKKKRDDFEKLTNYSVTDLNVQRKAIHELIQVMAELSPAAKTGKRKRSQMLFRGRRASQ

SEQ ID NO: 25 - protein, 477 aa, Homo sapiens
MTSKFLLVSFILAALSLSTTFSLQPDQQKVLLVSFDGFRWDYLYKVPTPHFHYIMKYGVHVKQVTNVFITKTYPNHYTLVTGLFAENHGIVANDMFDPIRNKSFSLDHMNIYDSKFWEEATPIWITNQRAGHTSGAAMWPGTDVKIHKRFPTHYMPYNESVSFEDRVAKIIEWFTSKEPINLGLLYWEDPDDMGHHLGPDSPLMGPVISDIDKKLGYLIQMLKKAKLWNTLNLIITSDHGMTQCSEERLIELDQYLDKDHYTLIDQSPVAAILPKEGKFDEVYEALTHAHPNLTVYKKEDVPERWHYKYNSRIQPIIAVADEGWHILQNKSDDFLLGNHGYDNALADMHPIFLAHGPAFRKNFSKEAMNSTDLYPLLCHLLNITAMPHNGSFWNVQDLLNSAMPRVVPYTQSTILLPGSVKPAEYDQEGSYPYFIGVSLGSIIVIVFFVIFIKHLIHSQIPALQDMHAEIAQPLLQA

SEQ ID NO: 26 - protein, 264 aa, Homo sapiens
MTKFSSFSLFFLIVGAYMTHVCFNMEIIGGKEVSPHSRPFMASIQYGGHHVCGGVLIDPQWVLTAAHCQYRFTKGQSPTVVLGAHSLSKNEASKQTLEIKKFIPFSRVTSDPQSNDIMLVKLQTAAKLNKHVKMLHIRSKTSLRSGTKCKVTGWGATDPDSLRPSDTLREVTVTVLSRKLCNSQSYYNGDPFITKDMVCAGDAKGQKDSCKGDSGGPLICKGVFHAIVSGGHECGVATKPGIYTLLTKKYQTWIKSNLVPPHTN

SEQ ID NO: 27 - protein, 153 aa, Homo sapiens [sequence omitted]

SEQ ID NO: 28 - protein, 134 aa, Homo sapiens
MRMLLHLSLLALGAAYVYAIPTEIPTSALVKETLALLSTHRTLLIANETLRIPVPVHKNHQLCTEEIFQGIGTLESQTVQGGTVERLFKNLSLIKKYIDGQKKKCGEERRRVNQFLDYLQEFLGVMNTEWIIES

SEQ ID NO: 29 - protein, 614 aa, Homo sapiens
MAWEARREPGPRRAAVRETVMLLLCLGVPTGRPYNVDTESALLYQGPHNTLFGYSVVLHSHGANRWLLVGAPTANWLANASVINPGAIYRCRIGKNPGQTCEQLQLGSPNGEPCGKTCLEERDNQWLGVTLSRQPGENGSIVTCGHRWKNIFYIKNENKLPTGGCYGVPPDLRTELSKRIAPCYQDYVKKFGENFASCQAGISSFYTKDLIVMGAPGSSYWTGSLFVYNITTNKYKAFLDKQNQVKFGSYLGYSVGAGHFRSQHTTEVVGGAPQHEQIGKAYIFSIDEKELNILHEMKGKKLGSYFGASVCAVDLNADGFSDLLVGAPMQSTIREEGRVFVYINSGSGAVMNAMETNLVGSDKYAARFGESIVNLGDIDNDGFEDVAIGAPQEDDLQGAIYIYNGRADGISSTFSQRIEGLQISKSLSMFGQSISGQIDADNNGYVDVAVGAFRSDSAVLLRTRPVVIVDASLSHPESVNRTKFDCVENGWPSVCIDLTLCFSYKGKEVPGYIVLFYNMSLDVNRKAESPPRFYFSSNGTSDVITGSIQVSSREANCRTHQAFMRKDVRDILTPIQIEAAYHLGPHVISKRSTEEFPPLQPILQQKKEKDIMKK

SEQ ID NO: 30 - protein, 372 aa, Homo sapiens [sequence omitted]

SEQ ID NO: 31 - protein, 148 aa, Homo sapiens
MAASPARPAVLALTGLALLLLLCWGPGGISGNKLKLMLQKREAPVPTKTKVAVDENKAKEFLGSLKRQKRQLWDRTRPEVQQWYQQFLYMGFDEAKFEDDITYWLNRDRNGHEYYGDYYQRHYDEDSAIGPRSPYGFRHGASVNYDDY

SEQ ID NO: 32 - protein, 270 aa, Homo sapiens
MFVALLGLGLGQVVCSVALFFYFRAQMDPNRISEDGTHCIYRILRLHENADFQDTTLESQDTKLIPDSCRRIKQAFQGAVQKELQHIVGSQHIRAEKAMVDGSWLDLAKRSKLEAQPFAHLTINATDIPSGSHKVSLSSWYHDRGWAKISNMTFSNGKLIVNQDGFYYLYANICFRHHETSGDLATEYLQLMVYVTKTSIKIPSSHTLMKGGSTKYWSGNSEFHFYSINVGGFFKLRSGEEISIEVSNPSLLDPDQDATYFGAFKVRDID

SEQ ID NO: 33 - protein, 4544 aa, Homo sapiens
MLTPPLLLLLPLLSALVAAAIDAPKTCSPKQFACRDQITCISKGWRCDGERDCPDGSDEAPEICPQSKAQRCQPNEHNCLGTELCVPMSRLCNGVQDCMDGSDEGPHCRELQGNCSRLGCQHHCVPTLDGPTCYCNSSFQLQADGKTCKDFDECSVYGTCSQLCTNTDGSFICGCVEGYLLQPDNRSCKAKNEPVDRPPVLLIANSQNILATYLSGAQVSTITPTSTRQTTAMDFSYANETVCWVHVGDSAAQTQLKCARMPGLKGFVDEHTINISLSLHHVEQMAIDWLTGNFYFVDDIDDRIFVCNRNGDTCVTLLDLELYNPKGIALDPAMGKVFFTDYGQIPKVERCDMDGQNRTKLVDSKIVFPHGITLDLVSRLVYWADAYLDYIEVVDYEGKGRQTIIQGILIEHLYGLTVFENYLYATNSDNANAQQKTSVIRVNRFNSTEYQVVTRVDKGGALHIYHQRRQPRVRSHACENDQYGKPGGCSDICLLANSHKARTCRCRSGFSLGSDGKSCKKPEHELFLVYGKGRPGIIRGMDMGAKVPDEHMIPIENLMNPRALDFHAETGFIYFADTTSYLIGRQKIDGTERETILKDGIHNVEGVAVDWMGDNLYWTDDGPKKTISVARLEKAAQTRKTLIEGKMTHPRAIVVDPLNGWMYWTDWEEDPKDSRRGRLERAWMDGSHRDIFVTSKTVLWPNGLSLDIPAGRLYWVDAFYDRIETILLNGTDRKIVYEGPELNHAFGLCHHGNYLFWTEYRSGSVYRLERGVGGAPPTVTLLRSERPPIFEIRMYDAQQQQVGTNKCRVNNGGCSSLCLATPGSRQCACAEDQVLDADGVTCLANPSYVPPPQCQPGEFACANSRCIQERWKCDGDNDCLDNSDEAPALCHQHTCPSDRFKCENNRCIPNRWLCDGDNDCGNSEDESNATCSARTCPPNQFSCASGRCIPISWTCDLDDDCGDRSDESASCAYPTCFPLTQFTCNNGRCININWRCDNDNDCGDNSDEAGCSHSCSSTQFKCNSGRCIPEHWTCDGDNDCGDYSDETHANCTNQATRPPGGCHTDEFQCRLDGLCIPLRWRCDGDTDCMDSSDEKSCEGVTHVCDPSVKFGCKDSARCISKAWVCDGDNDCEDNSDEENCESLACRPPSHPCANNTSVCLPPDKLCDGNDDCGDGSDEGELCDQCSLNNGGCSHNCSVAPGEGIVCSCPLGMELGPDNHTCQIQSYCAKHLKCSQKCDQNKFSVKCSCYEGWVLEPDGESCRSLDPFKPFIIFSNRHEIRRIDLHKGDYSVLVPGLRNTIALDFHLSQSALYWTDVVEDKIYRGKLLDNGALTSFEVVIQYGLATPEGLAVDWIAGNIYWVESNLDQIEVAKLDGTLRTTLLAGDIEHPRAIALDPRDGILFWTDWDASLPRIEAASMSGAGRRTVHRETGSGGWPNGLTVDYLEKRILWIDARSDAIYSARYDGSGHMEVLRGHEFLSHPFAVTLYGGEVYWTDWRTNTLAKANKWTGHNVTVVQRTNTQPFDLQVYHPSRQPMAPNPCEANGGQGPCSHLCLINYNRTVSCACPHLMKLHKDNTTCYEFKKFLLYARQMEIRGVDLDAPYYNYIISFTVPDIDNVTVLDYDAREQRVYWSDVRTQAIKRAFINGTGVETVVSADLPNAHGLAVDWVSRNLFWTSYDTNKKQINVARLDGSFKNAVVQGLEQPHGLVVHPLRGKLYWTDGDNISMANMDGSNRTLLFSGQKGPVGLAIDFPESKLYWISSGNHTINRCNLDGSGLEVIDAMRSQLGKATALAIMGDKLWWADQVSEKMGTCSKADGSGSVVLRNSTTLVMHMKVYDESIQLDHKGTNPCSVNNGDCSQLCLPTSETTRSCMCTAGYSLRSGQQACEGVGSFLLYSVHEGIRGIPLDPNDKSDALVPVSGTSLAVGIDFHAENDTIYWVDMGLSTISRAKRDQTWREDVVTNGIGRVEGIAVDWIAGNIYWTDQGFDVIEVARLNGSFRYVVISQGLDKPRAITVHPEKGYLFWTEWGQYPRIERSRLDGTERVVLVNVSISWPNGISVDYQDGKLYWCDARTDKIERIDLETGENREVVLSSNNMDMFSVSVFEDFIYWSDRTHANGSIKRGSKDNATDSVPLRTGIGVQLKDIKVFNRDRQKGTNVCAVANGGCQQLCLYRGRGQRACACAHGMLAEDGASCREYAGYLLYSERTILKSIHLSDERNLNAPVQPFEDPEHMKNVIALAFDYRAGTSPGTPNRIFFSDIHFGNIQQINDDGSRRITIVENVGSVEGLAYHRGWDTLYWTSYTTSTITRHTVDQTRPGAFERETVITMSGDDHPRAFVLDECQNLMFWTNWNEQHPSIMRAALSGANVLTLIEKDIRTPNGLAIDHRAEKLYFSDATLDKIERCEYDGSHRYVILKSEPVHPFGLAVYGEHIFWTDWVRRAVQRANKHVGSNMKLLRVDIPQQPMGIIAVANDTNSCELSPCRINNGGCQDLCLLTHQGHVNCSCRGGRILQDDLTCRAVNSSCRAQDEFECANGECINFSLTCDGVPHCKDKSDEKPSYCNSRRCKKTFRQCSNGRCVSNMLWCNGADDCGDGSDEIPCNKTACGVGEFRCRDGTCIGNSSRCNQFVDCEDASDEMNCSATDCSSYFRLGVKGVLFQPCERTSLCYAPSWVCDGANDCGDYSDERDCPGVKRPRCPLNYFACPSGRCIPMSWTCDKEDDCEHGEDETHCNKFCSEAQFECQNHRCISKQWLCDGSDDCGDGSDEAAHCEGKTCGPSSFSCPGTHVCVPERWLCDGDKDCADGADESIAAGCLYNSTCDDREFMCQNRQCIPKHFVCDHDRDCADGSDESPECEYPTCGPSEFRCANGRCLSSRQWECDGENDCHDQSDEAPKNPHCTSQEHKCNASSQFLCSSGRCVAEALLCNGQDDCGDSSDERGCHINECLSRKLSGCSQDCEDLKIGFKCRCRPGFRLKDDGRTCADVDECSTTFPCSQRCINTHGSYKCLCVEGYAPRGGDPHSCKAVTDEEPFLIFANRYYLRKLNLDGSNYTLLKQGLNNAVALDFDYREQMIYWTDVTTQGSMIRRMHLNGSNVQVLHRTGLSNPDGLAVDWVGGNLYWCDKGRDTIEVSKLNGAYRTVLVSSGLREPRALVVDVQNGYLYWTDWGDHSLIGRIGMDGSSRSVIVDTKITWPNGLTLDYVTERIYWADAREDYIEFASLDGSNRHVVLSQDIPHIFALTLFEDYVYWTDWETKSINRAHKTTGTNKTLLISTLHRPMDLHVFHALRQPDVPNHPCKVNNGGCSNLCLLSPGGGHKCACPTNFYLGSDGRTCVSNCTASQFVCKNDKCIPFWWKCDTEDDCGDHSDEPPDCPEFKCRPGQFQCSTGICTNPAFICDGDNDCQDNSDEANCDIHVCLPSQFKCTNTNRCIPGIFRCNGQDNCGDGEDERDCPEVTCAPNQFQCSITKRCIPRVWVCDRDNDCVDGSDEPANCTQMTCGVDEFRCKDSGRCIPARWKCDGEDDCGDGSDEPKEECDERTCEPYQFRCKNNRCVPGRWQCDYDNDCGDNSDEESCTPRPCSESEFSCANGRCIAGRWKCDGDHDCADGSDEKDCTPRCDMDQFQCKSGHCIPLRWRCDADADCMDGSDEEACGTGVRTCPLDEFQCNNTLCKPLAWKCDGEDDCGDNSDENPEECARFVCPPNRPFRCKNDRVCLWIGRQCDGTDNCGDGTDEEDCEPPTAHTTHCKDKKEFLCRNQRCLSSSLRCNMFDDCGDGSDEEDCSIDPKLTSCATNASICGDEARCVRTEKAAYCACRSGFHTVPGQPGCQDINECLRFGTCSQLCNNTKGGHLCSCARNFMKTHNTCKAEGSEYQVLYIADDNEIRSLFPGHPHSAYEQAFQGDESVRIDAMDVHVKAGRVYWTNWHTGTISYRSLPPAAPPTTSNRHRRQIDRGVTHLNISGLKMPRGIAIDWVAGNVYWTDSGRDVIEVAQMKGENRKTLISGMIDEPHAIVVDPLRGTMYWSDWGNHPKIETAAMDGTLRETLVQDNIQWPTGLAVDYHNERLYWADAKLSVIGSIRLNGTDPIVAADSKRGLSHPFSIDVFEDYIYGVTYINNRVFKIHKFGHSPLVNLTGGLSHASDVVLYHQHKQPEVTNPCDRKKCEWLCLLSPSGPVCTCPNGKRLDNGTCVPVPSPTPPPDAPRPGTCNLQCFNGGSCFLNARRQPKCRCQPRYTGDKCELDQCWEHCRNGGTCAASPSGMPTCRCPTGFTGPKCTQQVCAGYCANNSTCTVNQGNQPQCRCLPGFLGDRCQYRQCSGYCENFGTCQMAADGSRQCRCTAYFEGSRCEVNKCSRCLEGACVVNKQSGDVTCNCTDGRVAPSCLTCVGHCSNGGSCTMNSKMMPECQCPPHMTGPRCEEHVFSQQQPGHIASILIPLLLLLLLVLVAGVVFWYKRRVQGAKGFQHQRMTNGAMNVEIGNPTYKMYEGGEPDDVGGLLDADFALDPDKPTNFTNPVYATLYMGGHGSRHSLASTDEKRELLGRGPEDEIGDPLA

SEQ ID NO: 34 - protein, 349 aa, Homo sapiens
MAGGRCGPQLTALLAAWIAAVAATAGPEEAALPPEQSRVQPMTASNWTLVMEGEWMLKFYAPWCPSCQQTDSEWEAFAKNGEILQISVGKVDVIQEPGLSGRFFVTTLPAFFHAKDGIFRRYRGPGIFEDLQNYILEKKWQSVEPLTGWKSPASLTMSGMAGLFSISGKIWHLHNYFTVTLGIPAWCSYVFFVIATLVFGLFMGLVLVVISECFYVPLPRHLSERSEQNRRSEEAHRAEQLQDAEEEKDDSNEEENKDSLVDDEEEKEDLGDEDEAEEEEEEDNLAAGVDEERSEANDQGPPGEDGVTREEVEPEEAEEGISEQPCPADTEVVEDSLRQRKSQHADKGL

SEQ ID NO: 35 - protein, 653 aa, Homo sapiens
MRPLRPRAALLALLASLLAAPPVAPAEAPHLVHVDAARALWPLRRFWRSTGFCPPLPHSQADQYVLSWDQQLNLAYVGAVPHRGIKQVRTHWLLELVTTRGSTGRGLSYNFTHLDGYLDLLRENQLLPGFELMGSASGHFTDFEDKQQVFEWKDLVSSLARRYIGRYGLAHVSKWNFETWNEPDHHDFDNVSMTMQGFLNYYDACSEGLRAASPALRLGGPGDSFHTPPRSPLSWGLLRHCHDGTNFFTGEAGVRLDYISLHRKGARSSISILEQEKVVAQQIRQLFPKFADTPIYNDEADPLVGWSLPQPWRADVTYAAMVVKVIAQHQNLLLANTTSAFPYALLSNDNAFLSYHPHPFAQRTLTARFQVNNTRPPHVQLLRKPVLTAMGLLALLDEEQLWAEVSQAGTVLDSNHTVGVLASAHRPQGPADAWRAAVLIYASDDTRAHPNRSVAVTLRLRGVPPGPGLVYVTRYLDNGLCSPDGEWRRLGRPVFPTAEQFRRMRAAEDPVAAAPRPLPAGGRLTLRPALRLPSLLLVHVCARPEKPPGQVTRLRALPLTQGQLVLVWSDEHVGSKCLWTYEIQFSQDGKAYTPVSRKPSTFNLFVFSPDTGAVSGSYRVRALDYWARPGPFSDPVPYLEVPVPRGPPSPGNP

SEQ ID NO: 36 - protein, 439 aa, Homo sapiens
MKLANWYWLSSAVLATYGFLVVANNETEEIKDERAKDVCPVRLESRGKCEEAGECPYQVSLPPLTIQLPKQFSRIEEVFKEVQNLKEIVNSLKKSCQDCKLQADDNGDPGRNGLLLPSTGAPGEVGDNRVRELESEVNKLSSELKNAKEEINVLHGRLEKLNLVNMNNIENYVDSKVANLTFVVNSLDGKCSKCPSQEQIQSRPVQHLIYKDCSDYYAIGKRSSETYRVTPDPKNSSFEVYCDMETMGGGWTVLQARLDGSTNFTRTWQDYKAGFGNLRREFWLGNDKIHLLTKSKEMILRIDLEDFNGVELYALYDQFYVANEFLKYRLHVGNYNGTAGDALRFNKHYNHDLKFFTTPDKDNDRYPSGNCGLYYSSGWWFDACLSANLNGKYYHQKYRGVRNGIFWGTWPGVSEAHPGGYKSSFKEAKMMIRPKHFKP

SEQ ID NO: 37 - protein, 84 aa, Homo sapiens
MALSVLRLALLLLAVTFAASLIPQFGLFSKYRTPNCSQYRLPGCPRHFNPVCGSDMSTYANECTLCMKIREGGHNIKIIRNGPC

SEQ ID NO: 38 - protein, 202 aa, Homo sapiens
MKVLAAGVVPLLLVLHWKHGAGSPLPITPVNATCAIRHPCHNNLMNQIRSQLAQLNGSANALFILYYTAQGEPFPNNLDKLCGPNVTDFPPFHANGTEKAKLVELYRIVVYLGTSLGNITRDQKILNPSALSLHSKLNATADILRGLLSNVLCRLCSKYHVGHVDVTYGPDTSGKDVFQKKKLGCQLLGKYKQIIAVLAQAF

SEQ ID NO: 39 - protein, 354 aa, Homo sapiens
MRLAVLFSGALLGLLAAQGTGNDCPHKKSATLLPSFTVTPTVTESTGTTSHRTTKSHKTTTHRTTTTGTTSHGPTTATHNPTTTSHGNVTVHPTSNSTATSQGPSTATHSPATTSHGNATVHPTSNSTATSPGFTSSAHPEPPPPSPSPSPTSKETIGDYTWTNGSQPCVHLQAQIQIRVMYTTQGGGEAWGISVLNPNKTKVQGSCEGAHPHLLLSFPYGHLSFGFMQDLQQKVVYLSYMAVEYNVSFPHAAQWTFSAQNASLRDLQAPLGQSFSCSNSSIILSPAVHLDLLSLRLQAAQLPHTGVFGQSFSCPSDRSILLPLIIGLILLGLLALVLIAFCIIRRRPSAYQAL

SEQ ID NO: 40 - protein, 670 aa, Homo sapiens
MIASCLCYLLLPATRLFRALSDAFFTCRKNVLLANSSSPQVEGDFAMAPRGPEQEECEGLLQQWREEGLSQVLSTASEGPLIDKGLAQSSLALLMDNPGEENAASEDRWSSRQLSDLRAAENLDEPFPEMLGEEPLLEVEGVEGSMWAAIPMQSEPQYADCAALPVGALATEQWEEDPAVLAWSIAPEPVPQEEASIWPFEGLGQLQPPAVEIPYHEILWREWEDFSTQPDAQGLKAGDGPQFQFTLMSYNILAQDLMQQSSELYLHCHPDILNWNYRFVNLMQEFQHWDPDILCLQEVQEDHYWEQLEPSLRMMGFTCFYKRRTGCKTDGCAVCYKPTRFRLLCASPVEYFRPGLELLNRDNVGLVLLLQPLVPEGLGQVSVAPLCVANTHILYNPRRGDVKLAQMAILLAEVDKVARLSDGSHCPIILCGDLNSVPDSPLYNFIRDGELQYHGMPAWKVSGQEDFSHQLYQRKLQAPLWPSSLGITDCCQYVTSCHPKRSERRKYGRDFLLRFRFCSIACQRPVGLVLMEGVTDTKPERPAGWAESVLEEDASELEPAFSRTVGTIQHCLHLTSVYTHFLPQRGRPEVTTMPLGLGMTVDYIFFSAESCENGNRTDHRLYRDGTLKLLGRLSLLSEEILWAANGLPNPFCSSDHLCLLASFGMEVTAP

SEQ ID NO: 41 - protein, 159 aa, Homo sapiens
MKNHLLFWGVLAVFIKAVHVKAQEDERIVLVDNKCKCARITSRIIRSSEDPNEDIVERNIRIIVPLNNRENISDPTSPLRTRFVYHLSDLCKKCDPTEVELDNQIVTATQSNICDEDSATETCYTYDRNKCYTAVVPLVYGGETKMVETALTPDACYPD

SEQ ID NO: 42 - protein, 1218 aa, Homo sapiens
MRSPRTRGRSGRPLSLLLALLCALRAKVCGASGQFELEILSMQNVNGELQNGNCCGGARNPGDRKCTRDECDTYFKVCLKEYQSRVTAGGPCSFGSGSTPVIGGNTFNLKASRGNDRNRIVLPFSFAWPRSYTLLVEAWDSSNDTVQPDSIIEKASHSGMINPSRQWQTLKQNTGVAHFEYQIRVTCDDYYYGFGCNKFCRPRDDFFGHYACDQNGNKTCMEGWMGPECNRAICRQGCSPKHGSCKLPGDCRCQYGWQGLYCDKCIPHPGCVHGICNEPWQCLCETNWGGQLCDKDLNYCGTHQPCLNGGTCSNTGPDKYQCSCPEGYSGPNCEIAEHACLSDPCHNRGSCKETSLGFECECSPGWTGPTCSTNIDDCSPNNCSHGGTCQDLVNGFKCVCPPQWTGKTCQLDANECEAKPCVNAKSCKNLIASYYCDCLPGWMGQNCDININDCLGQCQNDASCRDLVNGYRCICPPGYAGDHCERDIDECASNPCLNGGHCQNEINRFQCLCPTGFSGNLCQLDIDYCEPNPCQNGAQCYNRASDYFCKCPEDYEGKNCSHLKDHCRTTPCEVIDSCTVAMASNDTPEGVRYISSNVCGPHGKCKSQSGGKFTCDCNKGFTGTYCHENINDCESNPCRNGGTCIDGVNSYKCICSDGWEGAYCETNINDCSQNPCHNGGTCRDLVNDFYCDCKNGWKGKTCHSRDSQCDEATCNNGGTCYDEGDAFKCMCPGGWEGTTCNIARNSSCLPNPCHNGGTCVVNGESFTCVCKEGWEGPICAQNTNDCSPHPCYNSGTCVDGDNWYRCECAPGFAGPDCRININECQSSPCAFGATCVDEINGYRCVCPPGHSGAKCQEVSGRPCITMGSVIPDGAKWDDDCNTCQCLNGRIACSKVWCGPRPCLLHKGHSECPSGQSCIPILDDQCFVHPCTGVGECRSSSLQPVKTKCTSDSYYQDNCANITFTFNKEMMSPGLTTEHICSELRNLNILKNVSAEYSIYIACEPSPSANNEIHVAISAEDIRDDGNPIKEITDKIIDLVSKRDGNSSLIAAVAEVRVQRRPLKNRTDFLVPLLSSVLTVAWICCLVTAFYWCLRKRRKPGSHTHSASEDNTTNNVREQLNQIKNPIEKHGANTVPIKDYENKNSKMSKIRTHNSEVEEDDMDKHQQKARFAKQPAYTLVDREEKPPNGTPTKHPNWTNKQDNRDLESAQSLNRMEYIV

SEQ ID NO: 43 - protein, 661 aa, Homo sapiens
MAFDVSCFFWVVLFSAGCKVITSWDQMCIEKEANKTYNCENLGLSEIPDTLPNTTEFLEFSFNFLPTIHNRTFSRLMNLTFLDLTRCQINWIHEDTFQSHHQLSTLVLTGNPLIFMAETSLNGPKSLKHLFLIQTGISNLEFIPVHNLENLESLYLGSNHISSIKFPKDFPARNLKVLDFQNNAIHYISREDMRSLEQAINLSLNFNGNNVKGIELGAFDSTIFQSLNFGGTPNLSVIFNGLQNSTTQSLWLGTFEDIDDEDISSAMLKGLCEMSVESLNLQEHRFSDISSTTFQCFTQLQELDLTATHLKGLPSGMKGLNLLKKLVLSVNHFDQLCQISAANFPSLTHLYIRGNVKKLHLGVGCLEKLGNLQTLDLSHNDIEASDCCSLQLKNLSHLQTLNLSHNEPLGLQSQAFKECPQLELLDLAFTRLHINAPQSPFQNLHFLQVLNLTYCFLDTSNQHLLAGLPVLRHLNLKGNHFQDGTITKTNLLQTVGSLEVLILSSCGLLSIDQQAFHSLGKMSHVDLSHNSLTCDSIDSLSHLKGIYLNLAANSINIISPRLLPILSQQSTINLSHNPLDCTCSNIHFLTWYKENLHKLEGSEETTCANPPSLRGVKLSDVKLSCGITAIGIFFLIVFLLLLAILLFFAVKYLLRWKYQHI

SEQ ID NO: 44 - protein, 831 aa, Homo sapiens
MERPWGAADGLSRWPHGLGLLLLLQLLPPSTLSQDRLDAPPPPAAPLPRWSGPIGVSWGLRAAAAGGAFPRGGRWRRSAPGEDEECGRVRDFVAKLANNTHQHVFDDLRGSVSLSWVGDSTGVILVLTTFHVPLVIMTFGQSKLYRSEDYGKNFKDITDLINNTFIRTEFGMAIGPENSGKVVLTAEVSGGSRGGRIFRSSDFAKNFVQTDLPFHPLTQMMYSPQNSDYLLALSTENGLWVSKNFGGKWEEIHKAVCLAKWGSDNTIFFTTYANGSCKADLGALELWRTSDLGKSFKTIGVKIYSFGLGGRFLFASVMADKDTTRRIHVSTDQGDTWSMAQLPSVGQEQFYSILAANDDMVFMHVDEPGDTGFGTIFTSDDRGIVYSKSLDRHLYTTTGGETDFTNVTSLRGVYITSVLSEDNSIQTMITFDQGGRWTHLRKPENSECDATAKNKNECSLHIHASYSISQKLNVPMAPLSEPNAVGIVIAHGSVGDAISVMVPDVYISDDGGYSWTKMLEGPHYYTILDSGGIIVAIEHSSRPINVIKFSTDEGQCWQTYTFTRDPIYFTGLASEPGARSMNISIWGFTESFLTSQWVSYTIDFKDILERNCEEKDYTIWLAHSTDPEDYEDGCILGYKEQFLRLRKSSVCQNGRDYVVTKQPSICLCSLEDFLCDFGYYRPENDSKCVEQPELKGHDLEFCLYGREEHLTTNGYRKIPGDKCQGGVNPVREVKDLKKKCTSNFLSPEKQNSKSNSVPIILAIVGLMLVTVVAGVLIVKKYVCGGRFLVHRYSVLQQHAEANGVDGVDALDTASHTNKSGYHDDSDEDLLE

SEQ ID NO: 45 - protein, 1021 aa, Homo sapiens
MAGISYVASFFLLLTKLSIGQREVTVQKGPLFRAEGYPVSIGCNVTGHQGPSEQHFQWSVYLPTNPTQEVQIISTKDAAFSYAVYTQRVRSGDVYVERVQGNSVLLHISKLQMKDAGEYECHTPNTDEKYYGSYSAKTNLIVIPDTLSATMSSQTLGKEEGEPLALTCEASKATAQHTHLSVTWYLTQDGGGSQATEIISLSKDFILVPGPLYTERFAASDVQLNKLGPTTFRLSIERLQSSDQGQLFCEATEWIQDPDETWMFITKKQTDQTTLRIQPAVKDFQVNITADSLFAEGKPLELVCLVVSSGRDPQLQGIWFFNGTEIAHIDAGGVLGLKNDYKERASQGELQVSKLGPKAFSLKIFSLGPEDEGAYRCVVAEVMKTRTGSWQVLQRKQSPDSHVHLRKPAARSVVMSTKNKQQVVWEGETLAFLCKAGGAESPLSVSWWHIPRDQTQPEFVAGMGQDGIVQLGASYGVPSYHGNTRLEKMDWATFQLEITFTAITDSGTYECRVSEKSRNQARDLSWTQKISVTVKSLESSLQVSLMSRQPQVMLTNTFDLSCVVRAGYSDLKVPLTVTWQFQPASSHIFHQLIRITHNGTIEWGNFLSRFQKKTKVSQSLFRSQLLVHDATEEETGVYQCEVEVYDRNSLYNNRPPRASAISHPLRIAVTLPESKLKVNSRSQVQELSINSNTDIECSILSRSNGNLQLAIIWYFSPVSTNASWLKILEMDQTNVIKTGDEFHTPQRKQKFHTEKVSQDLFQLHILNVEDSDRGKYHCAVEEWLLSTNGTWHKLGEKKSGLTELKLKPTGSKVRVSKVYWTENVTEHREVAIRCSLESVGSSATLYSVMWYWNRENSGSKLLVHLQHDGLLEYGEEGLRRHLHCYRSSSTDFVLKLHQVEMEDAGMYWCRVAEWQLHGHPSKWINQASDESQRMVLTVLPSEPTLPSRICSSAPLLYFLFICPFVLLLLLLISLLCLYWKARKLSTLRSNTRKEKALWVDLKEAGGVTTNRREDEEEDEGN

SEQ ID NO: 46 - protein, 263 aa, Homo sapiens
MDSYLLMWGLLTFIMVPGCQAELCDDDPPEIPHATFKAMAYKEGTMLNCECKRGFRRIKSGSLYMLCTGNSSHSSWDNQCQCTSSATRNTTKQVTPQPEEQKERKTTEMQSPMQPVDQASLPGHCREPPPWENEATERIYHFVVGQMVYYQCVQGYRALHRGPAESVCKMTHGKTRWTQPQLICTGEEKPQASPEGRPESETSCLVTTTDFQIQTEMAATMETSIFTTEYQVAVAGCVFLLISVLLLSGLTWQRRQRKSRRTI

SEQ ID NO: 47 - protein, 840 aa, Homo sapiens
MALASAAPGSIFCKQLLFSLLVLTLLCDACQKVYLRVPSHLQAETLVGKVNLEECLKSASLIRSSDPAFRILEDGSIYTTHDLILSSERKSFSIFLSDGQRREQQEIKVVLSARENKSPKKRHTKDTALKRSKRRWAPIPASLMENSLGPFPQHVQQIQSDAAQNYTIFYSISGPGVDKEPFNLFYIEKDTGDIFCTRSIDREKYEQFALYGYATTADGYAPEYPLPLIIKIEDDNDNAPYFEHRVTIFTVPENCRSGTSVGKVTATDLDEPDTLHTRLKYKILQQIPDHPKHFSIHPDTGVITTTTPFLDREKCDTYQLIMEVRDMGGQPFGLFNTGTITISLEDENDNPPSFTETSYVTEVEENRIDVEILRMKVQDQDLPNTPHSKAVYKILQGNENGNFIISTDPNTNEGVLCVVKPLNYEVNRQVILQVGVINEAQFSKAASSQTPTMCTTTVTVKIIDSDEGPECHPPVKVIQSQDGFPAGQELLGYKALDPEISSGEGLRYQKLGDEDNWFEINQHTGDLRTLKVLDRESKFVKNNQYNISVVAVDAVGRSCTGTLVVHLDDYNDHAPQIDKEVTICQNNEDFAVLKPVDPDGPENGPPFQFFLDNSASKNWNIEEKDGKTAILRQRQNLDYNYYSVPIQIKDRHGLVATHMLTVRVCDCSTPSECRMKDKSTRDVRPNVILGRWAILAMVLGSVLLLCILFTCFCVTAKRTVKKCFPEDIAQQNLIVSNTEGPGEEVTEANIRLPMQTSNICDTSMSVGTVGGQGIKTQQSFEMVKGGYTLDSNKGGGHQTLESVKGVGQGDTGRYAYTDWQSFTQPRLGEESIRGHTLIKN

SEQ ID NO: 48 - protein, 894 aa, Homo sapiens
MALASAAPGSIFCKQLLFSLLVLTLLCDACQKVYLRVPSHLQAETLVGKVNLEECLKSASLIRSSDPAFRILEDGSIYTTHDLILSSERKSFSIFLSDGQRREQQEIKVVLSARENKSPKKRHTKDTALKRSKRRWAPIPASLMENSLGPFPQHVQQIQSDAAQNYTIFYSISGPGVDKEPFNLFYIEKDTGDIFCTRSIDREKYEQFALYGYATTADGYAPEYPLPLIIKIEDDNDNAPYFEHRVTIFTVPENCRSGTSVGKVTATDLDEPDTLHTRLKYKILQQIPDHPKHFSIHPDTGVITTTTPFLDREKCDTYQLIMEVRDMGGQPFGLFNTGTITISLEDENDNPPSFTETSYVTEVEENRIDVEILRMKVQDQDLPNTPHSKAVYKILQGNENGNFIISTDPNTNEGVLCVVKPLNYEVNRQVILQVGVINEAQFSKAASSQTPTMCTTTVTVKIIDSDEGPECHPPVKVIQSQDGFPAGQELLGYKALDPEISSGEGLRYQKLGDEDNWFEINQHTGDLRTLKVLDRESKFVKNNQYNISVVAVDAVGRSCTGTLVVHLDDYNDHAPQIDKEVTICQNNEDFAVLKPVDPDGPENGPPFQFFLDNSASKNWNIEEKDGKTAILRQRQNLDYNYYSVPIQIKDRHGLVATHMLTVRVCDCSTPSECRMKDKSTRDVRPNVILGRWAILAMVLGSVLLLCILFTCFCVTAKRTVKKCFPEDIAQQNLIVSNTEGPGEEVTEANIRLPMQTSNICDTSMSVGTVGGQGIKTQQSFEMVKGGYTLDSNKGGGHQTLESVKGVGQGDTGRYAYTDWQSFTQPRLGEKVYLCGQDEEHKHCEDYVCSYNYEGKGSLAGSVGCCSDRQEEEGLEFLDHLEPKFRTLAKTCIKK

SEQ ID NO: 49 - protein, 433 aa, Homo sapiens
MRQSHQLPLVGLLLFSFIPSQLCEICEVSEENYIRLKPLLNTMIQSNYNRGTSAVNVVLSLKLVGIQIQTLMQKMIQQIKYNVKSRLSDVSSGELALIILALGVCRNAEENLIYDYHLIDKLENKFQAEIENMEAHNGTPLTNYYQLSLDVLALCLFNGNYSTAEVVNHFTPENKNYYFGSQFSVDTGAMAVLALTCVKKSLINGQIKADEGSLKNISIYTKSLVEKILSEKKENGLIGNTFSTGEAMQALFVSSDYYNENDWNCQQTLNTVLTEISQGAFSNPNAAAQVLPALMGKTFLDINKDSSCVSASGNFNISADEPITVTPPDSQSYISVNYSVRINETYFTNVTVLNGSVFLSVMEKAQKMNDTIFGFTMEERSWGPYITCIQGLCANNNDRTYWELLSGGEPLSQGAGSYVVRNGENLEVRWSKY

SEQ ID NO: 50 - protein, 918 aa, Homo sapiens
MPGGAGAARLCLLAFALQPLRPRAAREPGWTRGSEEGSPKLQHELIIPQWKTSESPVREKHPLKAELRVMAEGRELILDLEKNEQLFAPSYTETHYTSSGNPQTTTRKLEDHCFYHGTVRETELSSVTLSTCRGIRGLITVSSNLSYVIEPLPDSKGQHLIYRSEHLKPPPGNCGFEHSKPTTRDWALQFTQQTKKRPRRMKREDLNSMKYVELYLVADYLEFQKNRRDQDATKHKLIEIANYVDKFYRSLNIRIALVGLEVWTHGNMCEVSENPYSTLWSFLSWRRKLLAQKYHDNAQLITGMSFHGTTIGLAPLMAMCSVYQSGGVNMDHSENAIGVAATMAHEMGHNFGMTHDSADCCSASAADGGCIMAAATGHPFPKVFNGCNRRELDRYLQSGGGMCLSNMPDTRMLYGGRRCGNGYLEDGEECDCGEEEECNNPCCNASNCTLRPGAECAHGSCCHQCKLLAPGTLCREQARQCDLPEFCTGKSPHCPTNFYQMDGTPCEGGQAYCYNGMCLTYQEQCQQLWGPGARPAPDLCFEKVNVAGDTFGNCGKDMNGEHRKCNMRDAKCGKIQCQSSEARPLESNAVPIDTTIIMNGRQIQCRGTHVYRGPEEEGDMLDPGLVMTGTKCGYNHICFEGQCRNTSFFETEGCGKKCNGHGVCNNNQNCHCLPGWAPPFCNTPGHGGSIDSGPMPPESVGPVVAGVLVAILVLAVLMLMYYCCRQNNKLGQLKPSALPSKLRQQFSCPFRVSQNSGTGHANPTFKLQTPQGKRKVINTPEILRKPSQPPPRPPPDYLRGGSPPAPLPAHLSRAARNSPGPGSQIERTESSRRPPPSRPIPPAPNCIVSQDFSRPRPPQKALPANPVPGRRSLPRPGGASPLRPPGAGPQQSRPLAALAPKFPEYRSQRAGGMISSKI

SEQ ID NO: 51 - protein, 334 aa, Homo sapiens
MNLSLVLAAFCLGIASAVPKFDQNLDTKWYQWKATHRRLYGANEEGWRRAVWEKNMKMIELHNGEYSQGKHGFTMAMNAFGDMTNEEFRQMMGCFRNQKFRKGKVFREPLFLDLPKSVDWRKKGYVTPVKNQKQCGSCWAFSATGALEGQMFRKTGKLVSLSEQNLVDCSRPQGNQGCNGGFMARAFQYVKENGGLDSEESYPYVAVDEICKYRPENSVANDTGFTVVAPGKEKALMKAVATVGPISVAMDAGHSSFQFYKSGIYFEPDCSSKNLDHGVLVVGYGFEGANSNNSKYWLVKNSWGPEWGSNGYVKIAKDKNNHCGIATAASYPNV

SEQ ID NO: 52 - protein, 260 aa, Homo sapiens
MGPRARPALLLLMLLQTAVLQGRLLQSHTLQVILGCEMQEDNSTEGYWKYGYDGQDHLEFCPDTLDWRAAEPRAWPTKLEWERHKIRARQNRAYLERDCPAQLQQLLELGRGVLDQQVPPLVKVTHHVTSSVTTLRCRALNYYPQNITMKWLKDKQPMDAKEFEPKDVLPNGDGTYQGWITLAVPPGEEQRYTCQVEHPGLDQPLIVIWEPSPSGTLVIGVISGIAVFVVILFIGILFIILRKRQGSRGAMGHYVLAERE

SEQ ID NO: 53 - protein, 442 aa, Homo sapiens
MAPRSLLLLLSGALALTDTWAGSHSLRYFSTAVSRPGRGEPRYIAVEYVDDTQFLRFDSDAAIPRMEPREPWVEQEGPQYWEWTTGYAKANAQTDRVALRNLLRRYNQSEAGSHTLQGMNGCDMGPDGRLLRGYHQHAYDGKDYISLNEDLRSWTAADTVAQITQRFYEAEEYAEEFRTYLEGECLELLRRYLENGKETLQRADPPKAHVAHHPISDHEATLRCWALGFYPAEITLTWQRDGEEQTQDTELVETRPAGDGTFQKWAAVVVPPGEEQRYTCHVQHEGLPQPLILRWEQSPQPTIPIVGIVAGLVVLGAVVTGAVVAAVMWRKKSSDRNRGSYSQAAAYSVVSGNLMITWWSSLFLLGVLFQGYLGCLRSHSVLGRRKVGDMWILFFLWLWTSFNTAFLALQSLRFGFGFRRGRSFLLRSWHHLMKRVQIKIFD

SEQ ID NO: 54 - protein, 223 aa, Homo sapiens
MKFVPCLLLVTLSCLGTLGQAPRQKQGSTGEEFHFQTGGRDSCTMRPSSLGQGAGEVWLRVDCRNTDQTYWCEYRGQPSMCQAFAADPKPYWNQALQELRRLHHACQGAPVLRPSVCREAGPQAHMQQVTSSLKGSPEPNQQPEAGTPSLRPKATVKLTEATQLGKDSMEELGKAKPTTRPTAKPTQPGPRPGGNEEAKKKAWEHCWKPFQALCAFLISFFRG

SEQ ID NO: 55 - protein, 784 aa, Homo sapiens
MPHTLWMVWVLGVIISLSKEESSNQASLSCDRNGICKGSSGSLNSIPSGLTEAVKSLDLSNNRITYISNSDLQRCVNLQALVLTSNGINTIEEDSFSSLGSLEHLDLSYNYLSNLSSSWFKPLSSLTFLNLLGNPYKTLGETSLFSHLTKLQILRVGNMDTFTKIQRKDFAGLTFLEELEIDASDLQSYEPKSLKSIQNVSHLILHMKQHILLLEIFVDVTSSVECLELRDTDLDTFHFSELSTGETNSLIKKFTFRNVKITDESLFQVMKLLNQISGLLELEFDDCTLNGVGNFRASDNDRVIDPGKVETLTIRRLHIPRFYLFYDLSTLYSLTERVKRITVENSKVFLVPCLLSQHLKSLEYLDLSENLMVEEYLKNSACEDAWPSLQTLILRQNHLASLEKTGETLLTLKNLTNIDISKNSFHSMPETCQWPEKMKYLNLSSTRIHSVTGCIPKTLEILDVSNNNLNLFSLNLPQLKELYISRNKLMTLPDASLLPMLLVLKISRNAITTFSKEQLDSFHTLKTLEAGGNNFICSCEFLSFTQEQQALAKVLIDWPANYLCDSPSHVRGQQVQDVRLSVSECHRTALVSGMCCALFLLILLTGVLCHRFHGLWYMKMMWAWLQAKRKPRKAPSRNICYDAFVSYSERDAYWVENLMVQELENFNPPFKLCLHKRDFIPGKWIIDNIIDSIEKSHKTVFVLSENFVKSEWCKYELDFSHFRLFDENNDAAILILLEPIEKKAIPQRFCKLRKIMNTKTYLEWPMDEAQREGFWVNLRAAIKS

SEQ ID NO: 56 - protein, 318 aa, Homo sapiens
MASPGCLLCVLGLLLCGAASLELSRPHGDTAKKPIIGILMQKCRNKVMKNYGRYYIAASYVKYLESAGARVVPVRLDLTEKDYEILFKSINGILFPGGSVDLRRSDYAKVAKIFYNLSIQSFDDGDYFPVWGTCLGFEELSLLISGECLLTATDTVDVAMPLNFTGGQLHSRMFQNFPTELLLSLAVEPLTANFHKWSLSVKNFTMNEKLKKFFNVLTTNTDGKIEFISTMEGYKYPVYGVQWHPEKAPYEWKNLDGISHAPNAVKTAFYLAEFFVNEARKNNHHFKSESEEEKALIYQFSPIYTGNISSFQQCYIFD

SEQ ID NO: 57 - protein, 2214 aa, Homo sapiens
MATRSSRRESRLPFLFTLVALLPPGALCEVWTQRLHGGSAPLPQDRGFLVVQGDPRELRLWARGDARGASRADEKPLRRKRSAALQPEPIKVYGQVSLNDSHNQMVVHWAGEKSNVIVALARDSLALARPKSSDVYVSYDYGKSFKKISDKLNFGLGNRSEAVIAQFYHSPADNKRYIFADAYAQYLWITFDFCNTLQGFSIPFRAADLLLHSKASNLLLGFDRSHPNKQLWKSDDFGQTWIMIQEHVKSFSWGIDPYDKPNTIYIERHEPSGYSTVFRSTDFFQSRENQEVILEEVRDFQLRDKYMFATKVVHLLGSEQQSSVQLWVSFGRKPMRAAQFVTRHPINEYYIADASEDQVFVCVSHSNNRTNLYISEAEGLKFSLSLENVLYYSPGGAGSDTLVRYFANEPFADFHRVEGLQGVYIATLINGSMNEENMRSVITFDKGGTWEFLQAPAFTGYGEKINCELSQGCSLHLAQRLSQLLNLQLRRMPILSKESAPGLIIATGSVGKNLASKTNVYISSSAGARWREALPGPHYYTWGDHGGIITAIAQGMETNELKYSTNEGETWKTFIFSEKPVFVYGLLTEPGEKSTVFTIFGSNKENVHSWLILQVNATDALGVPCTENDYKLWSPSDERGNECLLGHKTVFKRRTPHATCFNGEDFDRPVVVSNCSCTREDYECDFGFKMSEDLSLEVCVPDPEFSGKSYSPPVPCPVGSTYRRTRGYRKISGDTCSGGDVEARLEGELVPCPLAEENEFILYAVRKSIYRYDLASGATEQLPLTGLRAAVALDFDYEHNCLYWSDLALDVIQRLCLNGSTGQEVIINSGLETVEALAFEPLSQLLYWVDAGFKKIEVANPDGDFRLTIVNSSVLDRPRALVLVPQEGVMFWTDWGDLKPGIYRSNMDGSAAYHLVSEDVKWPNGISVDDQWIYWTDAYLECIERITFSGQQRSVILDNLPHPYAIAVFKNEIYWDDWSQLSIFRASKYSGSQMEILANQLTGLMDMKIFYKGKNTGSNACVPRPCSLLCLPKANNSRSCRCPEDVSSSVLPSGDLMCDCPQGYQLKNNTCVKQENTCLRNQYRCSNGNCINSIWWCDFDNDCGDMSDERNCPTTICDLDTQFRCQESGTCIPLSYKCDLEDDCGDNSDESHCEMHQCRSDEYNCSSGMCIRSSWVCDGDNDCRDWSDEANCTAIYHTCEASNFQCRNGHCIPQRWACDGDTDCQDGSDEDPVNCEKKCNGFRCPNGTCIPSSKHCDGLRDCSDGSDEQHCEPLCTHFMDFVCKNRQQCLFHSMVCDGIIQCRDGSDEDAAFAGCSQDPEFHKVCDEFGFQCQNGVCISLIWKCDGMDDCGDYSDEANCENPTEAPNCSRYFQFRCENGHCIPNRWKCDRENDCGDWSDEKDCGDSHILPFSTPGPSTCLPNYYRCSSGTCVMDTWVCDGYRDCADGSDEEACPLLANVTAASTPTQLGRCDRFEFECHQPKTCIPNWKRCDGHQDCQDGRDEANCPTHSTLTCMSREFQCEDGEACIVLSERCDGFLDCSDESDEKACSDELTVYKVQNLQWTADFSGDVTLTWMRPKKMPSASCVYNVYYRVVGESIWKTLETHSNKTNTVLKVLKPDTTYQVKVQVQCLSKAHNTNDFVTLRTPEGLPDAPRNLQLSLPREAEGVIVGHWAPPIHTHGLIREYIVEYSRSGSKMWASQRAASNFTEIKNLLVNTLYTVRVAAVTSRGIGNWSDSKSITTIKGKVIPPPDIHIDSYGENYLSFTLTMESDIKVNGYVVNLFWAFDTHKQERRTLNFRGSILSHKVGNLTAHTSYEISAWAKTDLGDSPLAFEHVMTRGVRPPAPSLKAKAINQTAVECTWTGPRNVVYGIFYATSFLDLYRNPKSLTTSLHNKTVIVSKDEQYLFLVRVVVPYQGPSSDYVVVKMIPDSRLPPRHLHVVHTGKTSVVIKWESPYDSPDQDLLYAVAVKDLIRKTDRSYKVKSRNSTVEYTLNKLEPGGKYHIIVQLGNMSKDSSIKITTVSLSAPDALKIITENDHVLLFWKSLALKEKHFNESRGYEIHMFDSAMNITAYLGNTTDNFFKISNLKMGHNYTFTVQARCLFGNQICGEPAILLYDELGSGADASATQAARSTDVAAVVVPILFLILLSLGVGFAILYTKHRRLQSSFTAFANSHYSSRLGSAIFSSGDDLGEDDEDAPMITGFSDDVPMVIA

SEQ ID NO: 58 - protein, 148 aa, Homo sapiens
MKALIVLGLVLLSVTVQGKVFERCELARTLKRLGMDGYRGISLANWMCLAKWESGYNTRATNYNAGDRSTDYGIFQINSRYWCNDGKTPGAVNACHLSCSALLQDNIADAVACAKRVVRDPQGIRAWVAWRNRCQNRDVRQYVQGCGV

SEQ ID NO: 59 - protein, 1613 aa, Homo sapiens
MGAVLRSLLACSFCVLLRAAPLLLYANRRDLRLVDATNGKENATIVVGGLEDAAAVDFVFSHGLIYWSDVSEEAIKRTEFNKTESVQNVVVSGLLSPDGLACDWLGEKLYWTDSETNRIEVSNLDGSLRKVLFWQELDQPRAIALDPSSGFMYWTDWGEVPKIERAGMDGSSRFIIINSEIYWPNGLTLDYEEQKLYWADAKLNFIHKSNLDGTNRQAVVKGSLPHPFALTLFEDILYWTDWSTHSILACNKYTGEGLREIHSDIFSPMDIHAFSQQRQPNATNPCGIDNGGCSHLCLMSPVKPFYQCACPTGVKLLENGKTCKDGATELLLLARRTDLRRISLDTPDFTDIVLQLEDIRHAIAIDYDPVEGYIYWTDDEVRAIRRSFIDGSGSQFVVTAQIAHPDGIAVDWVARNLYWTDTGTDRIEVTRLNGTMRKILISEDLEEPRAIVLDPMVGYMYWTDWGEIPKIERAALDGSDRVVLVNTSLGWPNGLALDYDEGKIYWGDAKTDKIEVMNTDGTGRRVLVEDKIPHIFGFTLLGDYVYWTDWQRRSIERVHKRSAEREVIIDQLPDLMGLKATNVHRVIGSNPCAEENGGCSHLCLYRPQGLRCACPIGFELISDMKTCIVPEAFLLFSRRADIRRISLETNNNNVAIPLTGVKEASALDFDVTDNRIYWTDISLKTISRAFMNGSALEHVVEFGLDYPEGMAVDWLGKNLYWADTGTNRIEVSKLDGQHRQVLVWKDLDSPRALALDPAEGFMYWTEWGGKPKIDRAAMDGSERTTLVPNVGRANGLTIDYAKRRLYWTDLDTNLIESSNMLGLNREVIADDLPHPFGLTQYQDYIYWTDWSRRSIERANKTSGQNRTIIQGHLDYVMDILVFHSSRQSGWNECASSNGHCSHLCLAVPVGGFVCGCPAHYSLNADNRTCSAPTTFLLFSQKSAINRMVIDEQQSPDIILPIHSLRNVRAIDYDPLDKQLYWIDSRQNMIRKAQEDGSQGFTVVVSSVPSQNLEIQPYDLSIDIYSRYIYWTCEATNVINVTRLDGRSVGVVLKGEQDRPRAVVVNPEKGYMYFTNLQERSPKIERAALDGTEREVLFFSGLSKPIALALDSRLGKLFWADSDLRRIESSDLSGANRIVLEDSNILQPVGLTVFENWLYWIDKQQQMIEKIDMTGREGRTKVQARIAQLSDIHAVKELNLQEYRQHPCAQDNGGCSHICLVKGDGTTRCSCPMHLVLLQDELSCGEPPTCSPQQFTCFTGEIDCIPVAWRCDGFTECEDHSDELNCPVCSESQFQCASGQCIDGALRCNGDANCQDKSDEKNCEVLCLIDQFRCANGQCIGKHKKCDHNVDCSDKSDELDCYPTEEPAPQATNTVGSVIGVIVTIFVSGTVYFICQRMLCPRMKGDGETMTNDYVVHGPASVPLGYVPHPSSLSGSLPGMSRGKSMISSLSIMGGSSGPPYDRAHVTGASSSSSSSTKGTYFPAILNPPPSPATERSHYTMEFGYSSNSPSTHRSYSYRPYSYRHFAPPTTPCSTDVCDSDYAPSRRMTSVATAKGYTSDLNYDSEPVPPPPTPRSQYLSAEENYESCPPSPYTERSYSHHLYPPPPSPCTDSS

SEQ ID NO: 60 - protein, 1106 aa, Homo sapiens
MRLPGAMPALALKGELLLLSLLLLLEPQISQGLVVTPPGPELVLNVSSTFVLTCSGSAPVVWERMSQEPPQEMAKAQDGTFSSVLTLTNLTGLDTGEYFCTHNDSRGLETDERKRLYIFVPDPTVGFLPNDAEELFIFLTEITEITIPCRVTDPQLVVTLHEKKGDVALPVPYDHQRGFSGIFEDRSYICKTTIGDREVDSDAYYVYRLQVSSINVSVNAVQTVVRQGENITLMCIVIGNEVVNFEWTYPRKESGRLVEPVTDFLLDMPYHIRSILHIPSAELEDSGTYTCNVTESVNDHQDEKAINITVVESGYVRLLGEVGTLQFAELHRSRTLQVVFEAYPPPTVLWFKDNRTLGDSSAGEIALSTRNVSETRYVSELTLVRVKVAEAGHYTMRAFHEDAEVQLSFQLQINVPVRVLELSESHPDSGEQTVRCRGRGMPQPNIIWSACRDLKRCPRELPPTLLGNSSEEESQLETNVTYWEEEQEFEVVSTLRLQHVDRPLSVRCTLRNAVGQDTQEVIVVPHSLPFKVVVISAILALVVLTIISLIILIMLWQKKPRYEIRWKVIESVSSDGHEYIYVDPMQLPYDSTWELPRDQLVLGRTLGSGAFGQVVEATAHGLSHSQATMKVAVKMLKSTARSSEKQALMSELKIMSHLGPHLNVVNLLGACTKGGPIYIITEYCRYGDLVDYLHRNKHTFLQHHSDKRRPPSAELYSNALPVGLPLPSHVSLTGESDGGYMDMSKDESVDYVPMLDMKGDVKYADIESSNYMAPYDNYVPSAPERTCRATLINESPVLSYMDLVGFSYQVANGMEFLASKNCVHRDLAARNVLICEGKLVKICDFGLARDIMRDSNYISKGSTFLPLKWMAPESIFNSLYTTLSDVWSFGILLWEIFTLGGTPYPELPMNEQFYNAIKRGYRMAQPAHASDEIYEIMQKCWEEKFEIRPPFSQLVLLLERLLGEGYKKKYQQVDEEFLRSDHPAILRSQARLPGFHGLRSPLDTSSVLYTAVQPNEGDNDYIIPLPDPKPEVADEGPLEGSPSLASSTLNEVNTSSTISCDSPLEPQDEPEPEPQLELQVEPEPELEQLPDSGCPAPRAEAEDSFL

SEQ ID NO: 61 - protein, 1363 aa, Homo sapiens
MQRGAALCLRLWLCLGLLDGLVSGYSMTPPTLNITEESHVIDTGDSLSISCRGQHPLEWAWPGAQEAPATGDKDSEDTGVVRDCEGTDARPYCKVLLLHEVHANDTGSYVCYYKYIKARIEGTTAASSYVFVRDFEQPFINKPDTLLVNRKDAMWVPCLVSIPGLNVTLRSQSSVLWPDGQEVVWDDRRGMLVSTPLLHDALYLQCETTWGDQDFLSNPFLVHITGNELYDIQLLPRKSLELLVGEKLVLNCTVWAEFNSGVTFDWDYPGKQAERGKWVPERRSQQTHTELSSILTIHNVSQHDLGSYVCKANNGIQRFRESTEVIVHENPFISVEWLKGPILEATAGDELVKLPVKLAAYPPPEFQWYKDGKALSGRHSPHALVLKEVTEASTGTYTLALWNSAAGLRRNISLELVVNVPPQIHEKEASSPSIYSRHSRQALTCTAYGVPLPLSIQWHWRPWTPCKMFAQRSLRRRQQQDLMPQCRDWRAVTTQDAVNPIESLDTWTEFVEGKNKTVSKLVIQNANVSAMYKCVVSNKVGQDERLIYFYVTTIPDGFTIESKPSEELLEGQPVLLSCQADSYKYEHLRWYRLNLSTLHDAHGNPLLLDCKNVHLFATPLAASLEEVAPGARHATLSLSIPRVAPEHEGHYVCEVQDRRSHDKHCHKKYLSVQALEAPRLTQNLTDLLVNVSDSLEMQCLVAGAHAPSIVWYKDERLLEEKSGVDLADSNQKLSIQRVREEDAGRYLCSVCNAKGCVNSSASVAVEGSEDKGSMEIVILVGTGVIAVFFWVLLLLIFCNMRRPAHADIKTGYLSIIMDPGEVPLEEQCEYLSYDASQWEFPRERLHLGRVLGYGAFGKVVEASAFGIHKGSSCDTVAVKMLKEGATASEHRALMSELKILIHIGNHLNVVNLLGACTKPQGPLMVIVEFCKYGNLSNFLRAKRDAFSPCAEKSPEQRGRFRAMVELARLDRRRPGSSDRVLFARFSKTEGGARRASPDQEAEDLWLSPLTMEDLVCYSFQVARGMEFLASRKCIHRDLAARNILLSESDVVKICDFGLARDIYKDPDYVRKGSARLPLKWMAPESIFDKVYTTQSDVWSFGVLLWEIFSLGASPYPGVQINEEFCQRLRDGTRMRAPELATPAIRRIMLNCWSGDPKARPAFSELVEILGDLLQGRGLQEEEEVCMAPRSSQSSEEGSFSQVSTMALHIAQADAEDSPPSLQRHSLAARYYNWVSFPGCLARGAETRGSSRMKTFEEFPMTPTTYKGSVDNQTDSGMVLASEEFEQIESRHRQESGFSCKGPGQNVAVTRAHPDSQGRRRRPERGARGGQVFYNSEYGELSEPSEEDHCSPSARVTFFTDNSY

SEQ ID NO: 62 - protein, 384 aa, Homo sapiens
MSCAGRAGPARLAALALLTCSLWPARADNASQEYYTALINVTVQEPGRGAPLTFRIDRGRYGLDSPKAEVRGQVLAPLPLHGVADHLGCDPQTRFFVPPNIKQWIALLQRGNCTFKEKISRAAFHNAVAVVIYNNKSKEEPVTMTHPGTGDIIAVMITELRGKDILSYLEKNISVQMTIAVGTRMPPKNFSRGSLVFVSISFIVLMIISSAWLIFYFIQKIRYTNARDRNQRRLGDAAKKAISKLTTRTVKKGDKETDPDFDHCAVCIESYKQNDVVRILPCKHVFHKSCVDPWLSEHCTCPMCKLNILKALGIVPNLPCTDNVAFDMERLTRTQAVNRRSALGDLAGDNSLGLEPLRTSGISPLPQDGELTPRTGEINIAVTR

SEQ ID NO: 63 - protein, 452 aa, Homo sapiens
MELALRRSPVPRWLLLLPLLLGLNAGAVIDWPTEEGKEVWDYVTVRKDAYMFWWLYYATNSCKNFSELPLVMWLQGGPGGSSTGFGNFEEIGPLDSDLKPRKTTWLQAASLLFVDNPVGTGFSYVNGSGAYAKDLAMVASDMMVLLKTFFSCHKEFQTVPFYIFSESYGGKMAAGIGLELYKAIQRGTIKCNFAGVALGDSWISPVDSVLSWGPYLYSMSLLEDKGLAEVSKVAEQVLNAVNKGLYREATELWGKAEMIIEQNTDGVNFYNILTKSTPTSTMESSLEFTQSHLVCLCQRHVRHLQRDALSQLMNGPIRKKLKIIPEDQSWGGQATNVFVNMEEDFMKPVISIVDELLEAGINVTVYNGQLDLIVDTMGQEAWVRKLKWPELPKFSQLKWKALYSDPKSLETSAFVKSYKNLAFYWILKAGHMVPSDQGDMALKMMRLVTQQE

SEQ ID NO: 64 - protein, 1039 aa, Homo sapiens
MARALCPLQALWLLEWVLLLLGPCAAPPAWALNLDPVQLTFYAGPNGSQFGFSLDFHKDSHGRVAIVVGAPRTLGPSQEETGGVFLCPWRAEGGQCPSLLFDLRDETRNVGSQTLQTFKARQGLGASVVSWSDVIVACAPWQHWNVLEKTEEAEKTPVGSCFLAQPESGRRAEYSPCRGNTLSRIYVENDFSWDKRYCEAGFSSVVTQAGELVLGAPGGYYFLGLLAQAPVADIFSSYRPGILLWHVSSQSLSFDSSNPEYFDGYWGYSVAVGEFDGDLNTTEYVVGAPTWSWTLGAVEILDSYYQRLHRLRGEQMASYFGHSVAVTDVNGDGRHDLLVGAPLYMESRADRKLAEVGRVYLFLQPRGPHALGAPSLLLTGTQLYGRFGSAIAPLGDLDRDGYNDIAVAAPYGGPSGRGQVLVFLGQSEGLRSRPSQVLDSPFPTGSAFGFSLRGAVDIDDNGYPDLIVGAYGANQVAVYRAQPVVKASVQLLVQDSLNPAVKSCVLPQTKTPVSCFNIQMCVGATGHNIPQKLSLNAELQLDRQKPRQGRRVLLLGSQQAGTTLNLDLGGKHSPICHTTMAFLRDEADFRDKLSPIVLSLNVSLPPTEAGMAPAVVLHGDTHVQEQTRIVLDCGEDDVCVPQLQLTASVTGSPLLVGADNVLELQMDAANEGEGAYEAELAVHLPQGAHYMRALSNVEGFERLICNQKKENETRVVLCELGNPMKKNAQIGIAMLVSVGNLEEAGESVSFQLQIRSKNSQNPNSKIVLLDVPVRAEAQVELRGNSFPASLVVAAEEGEREQNSLDSWGPKVEHTYELHNNGPGTVNGLHLSIHLPGQSQPSDLLYILDIQPQGGLQCFPQPPVNPLKVDWGLPIPSPSPIHPAHHKRDRRQIFLPEPEQPSRLQDPVLVSCDSAPCTVVQCDLQEMARGQRAMVTVLAFLWLPSLYQRPLDQFVLQSHAWFNVSSLPYAVPPLSLPRGEAQVWTQLLRALEERAIPIWWVLVGVLGGLLLLTILVLAMWKVGFFKRNRPPLEEDDEEGE

SEQ ID NO: 65 - protein, 220 aa, Homo sapiens
MGAAARTLRLALGLLLLATLLRPADACSCSPVHPQQAFCNADVVIRAKAVSEKEVDSGNDIYGNPIKRIQYEIKQIKMFKGPEKDIEFIYTAPSSAVCGVSLDVGGKKEYLIAGKAEGDGKMHITLCDFIVPWDTLSTTQKKSLNHRYQMGCECKITRCPMIPCYISSPDECLWMDWVTEKNINGHQAKFFACIKRSDGSCAWYRGAAPPKQEFLDIEDP

SEQ ID NO: 66 - protein, 889 aa, Homo sapiens
MVLAQGLLSMALLALCWERSLAGAEETIPLQTLRCYNDYTSHITCRWADTQDAQRLVNVTLIRRVNEDLLEPVSCDLSDDMPWSACPHPRCVPRRCVIPCQSFVVTDVDYFSFQPDRPLGTRLTVTLTQHVQPPEPRDLQISTDQDHFLLTWSVALGSPQSHWLSPGDLEFEVVYKRLQDSWEDAAILLSNTSQATLGPEHLMPSSTYVARVRTRLAPGSRLSGRPSKWSPEVCWDSQPGDEAQPQNLECFFDGAAVLSCSWEVRKEVASSVSFGLFYKPSPDAGEEECSPVLREGLGSLHTRHHCQIPVPDPATHGQYIVSVQPRRAEKHIKSSVNIQMAPPSLNVTKDGDSYSLRWETMKMRYEHIDHTFEIQYRKDTATWKDSKTETLQNAHSMALPALEPSTRYWARVRVRTSRTGYNGIWSEWSEARSWDTESVLPMWVLALIVIFLTIAVLLALRFCGIYGYRLRRKWEEKIPNPSKSHLFQNGSAELWPPGSMSAFTSGSPPHQGPWGSRFPELEGVFPVGFGDSEVSPLTIEDPKHVCDPPSGPDTTPAASDLPTEQPPSPQPGPPAASHTPEKQASSFDFNGPYLGPPHSRSLPDILGQPEPPQEGGSQKSPPPGSLEYLCLPAGGQVQLVPLAQAMGPGQAVEVERRPSQGAAGSPSLESGGGPAPPALGPRVGGQDQKDSPVAIPMSSGDTEDPGVASGYVSSADLVFTPNSGASSVSLVPSLGLPSDQTPSLCPGLASGPPGAPGPVKSGFEGYVELPPIEGRSPRSPRNNPVPPEAKSPVLNPGERPADVSPTSPQPEGLLVLQQVGDYCFLPGLGPGPLSLRSKPSSPGPGPEIKNLDQAFQVKKPPGQAVPQVPVIQLFKALVVSVMSVGPPVP

SEQ ID NO: 67 - protein, 1501 aa, Homo sapiens
MAPTWGPGMVSVVGPMGLLVVLLVGGCAAEEPPRFIKEPKDQIGVSGGVASFVCQATGDPKPRVTWNKKGKKVNSQRFETIEFDESAGAVLRIQPLRTPRDENVYECVAQNSVGEITVHAKLTVLREDQLPSGFPNIDMGPQLKVVERTRTATMLCAASGNPDPEITWFKDFLPVDPSASNGRIKQLRSGALQIESSEETDQGKYECVATNSAGVRYSSPANLYVRVRRVAPRFSILPMSHEIMPGGNVNITCVAVGSPMPYVKWMQGAEDLTPEDDMPVGRNVLELTDVKDSANYTCVAMSSLGVIEAVAQITVKSLPKAPGTPMVTENTATSITITWDSGNPDPVSYYVIEYKSKSQDGPYQIKEDITTTRYSIGGLSPNSEYEIWVSAVNSIGQGPPSESVVTRTGEQAPASAPRNVQARMLSATTMIVQWEEPVEPNGLIRGYRVYYTMEPEHPVGNWQKHNVDDSLLTTVGSLLEDETYTVRVLAFTSVGDGPLSDPIQVKTQQGVPGQPMNLRAEARSETSITLSWSPPRQESIIKYELLFREGDHGREVGRTFDPTTSYVVEDLKPNTEYAFRLAARSPQGLGAFTPVVRQRTLQSISPKNFKVKMIMKTSVLLSWEFPDNYNSPTPYKIQYNGLTLDVDGRTTKKLITHLKPHTFYNFVLTNRGSSLGGLQQTVTAWTAFNLLNGKPSVAPKPDADGFIMVYLPDGQSPVPVQSYFIVMVPLRKSRGGQFLTPLGSPEDMDLEELIQDISRLQRRSLRHSRQLEVPRPYIAARFSVLPPTFHPGDQKQYGGFDNRGLEPGHRYVLFVLAVLQKSEPTFAASPFSDPFQLDNPDPQPIVDGEEGLIWVIGPVLAVVFIICIVIAILLYKKKPHSKRKDSEPRTKCLLNNADLAPHHPKDPVEMRRINFQTPGMLSHPPIPIADMAEHTERLKANDSLKLSQEYESIDPGQQFTWEHSNLEVNKPKNRYANVIAYDHSRVILQPIEGIMGSDYINANYVDGYRCQNAYIATQGPLPETFGDFWRMVWEQRSATIVMMTRLEEKSRIKCDQYWPNRGTETYGFIQVTLLDTIELATFCVRTFSLHKNGSSEKREVRQFQFTAWPDHGVPEYPTPFLAFLRRVKTCNPPDAGPIVVHCSAGVGRTGCFIVIDAMLERIKPEKTVDVYGHVTLMRSQRNYMVQTEDQYSFIHEALLEAVGCGNTEVPARSLYAYIQKLAQVEPGEHVTGMELEFKRLANSKAHTSRFISANLPCNKFKNRLVNIMPYESTRVCLQPIRGVEGSDYINASFIDGYRQQKAYIATQGPLAETTEDFWRMLWENNSTIVVMLTKLREMGREKCHQYWPAERSARYQYFVVDPMAEYNMPQYILREFKVTDARDGQSRTVRQFQFTDWPEQGVPKSGEGFIDFIGQVHKTKEQFGQDGPISVHCSAGVGRTGVFITLSIVLERMRYEGVVDIFQTVKMLRTQRPAMVQTEDEYQFCYQAALEYLGSFDHYAT

SEQ ID NO: 68 - protein, 819 aa, Homo sapiens
MVSWGRFICLVVVTMATLSLARPSFSLVEDTTLEPEEPPTKYQISQPEVYVAAPGESLEVRCLLKDAAVISWTKDGVHLGPNNRTVLIGEYLQIKGATPRDSGLYACTASRTVDSETWYFMVNVTDAISSGDDEDDTDGAEDFVSENSNNKRAPYWTNTEKMEKRLHAVPAANTVKFRCPAGGNPMPTMRWLKNGKEFKQEHRIGGYKVRNQHWSLIMESVVPSDKGNYTCVVENEYGSINHTYHLDVVERSPHRPILQAGLPANASTVVGGDVEFVCKVYSDAQPHIQWIKHVEKNGSKYGPDGLPYLKVLKAAGVNTTDKEIEVLYIRNVTFEDAGEYTCLAGNSIGISFHSAWLTVLPAPGREKEITASPDYLEIAIYCIGVFLIACMVVTVILCRMKNTTKKPDFSSQPAVHKLTKRIPLRRQVSAESSSSMNSNTPLVRITTRLSSTADTPMLAGVSEYELPEDPKWEFPRDKLTLGKPLGEGCFGQVVMAEAVGIDKDKPKEAVTVAVKMLKDDATEKDLSDLVSEMEMMKMIGKHKNIINLLGACTQDGPLYVIVEYASKGNLREYLRARRPPGMEYSYDINRVPEEQMTFKDLVSCTYQLARGMEYLASQKCIHRDLAARNVLVTENNVMKIADFGLARDINNIDYYKKTTNGRLPVKWMAPEALFDRVYTHQSDVWSFGVLMWEIFTLGGSPYPGIPVEELFKLLKEGHRMDKPANCTNELYMMMRDCWHAVPSQRPTFKQLVEDLDRILTLTTNEEYLDLSQPLEQYSPSYPDTRSSCSSGDDSVFSPDPMPYEPCLPQYPHINGSVKT

SEQ ID NO: 69 - protein, 1722 aa, Homo sapiens
MRTGWATPRRPAGLLMLLFWFFDLAEPSGRAANDPFTIVHGNTGKCIKPVYGWIVADDCDETEDKLWKWVSQHRLFHLHSQKCLGLDITKSVNELRMFSCDSSAMLWWKCEHHSLYGAARYRLALKDGHGTAISNASDVWKKGGSEESLCDQPYHEIYTRDGNSYGRPCEFPFLIDGTWHHDCILDEDHSGPWCATTLNYEYDRKWGICLKPENGCEDNWEKNEQFGSCYQFNTQTALSWKEAYVSCQNQGADLLSINSAAELTYLKEKEGIAKIFWIGLNQLYSARGWEWSDHKPLNFLNWDPDRPSAPTIGGSSCARMDAESGLWQSFSCEAQLPYVCRKPLNNTVELTDVWTYSDTRCDAGWLPNNGFCYLLVNESNSWDKAHAKCKAFSSDLISIHSLADVEVVVTKLHNEDIKEEVWIGLKNINIPTLFQWSDGTEVTLTYWDENEPNVPYNKTPNCVSYLGELGQWKVQSCEEKLKYVCKRKGEKLNDASSDKMCPPDEGWKRHGETCYKIYEDEVPFGTNCNLTITSRFEQEYLNDLMKKYDKSLRKYFWTGLRDVDSCGEYNWATVGGRRRAVTFSNWNFLEPASPGGCVAMSTGKSVGKWEVKDCRSFKALSICKKMSGPLGPEEASPKPDDPCPEGWQSFPASLSCYKVFHAERIVRKRNWEEAERFCQALGAHLSSFSHVDEIKEFLHFLTDQFSGQHWLWIGLNKRSPDLQGSWQWSDRTPVSTIIMPNEFQQDYDIRDCAAVKVFHRPWRRGWHFYDDREFIYLRPFACDTKLEWVCQIPKGRTPKTPDWYNPDRAGIHGPPLIIEGSEYWFVADLHLNYEEAVLYCASNHSFLATITSFVGLKAIKNKIANISGDGQKWWIRISEWPIDDHFTYSRYPWHRFPVTFGEECLYMSAKTWLIDLGKPTDCSTKLPFICEKYNVSSLEKYSPDSAAKVQCSEQWIPFQNKCFLKIKPVSLTFSQASDTCHSYGGTLPSVLSQIEQDFITSLLPDMEATLWIGLRWTAYEKINKWTDNRELTYSNFHPLLVSGRLRIPENFFEEESRYHCALILNLQKSPFTGTWNFTSCSERHFVSLCQKYSEVKSRQTLQNASETVKYLNNLYKIIPKTLTWHSAKRECLKSNMQLVSITDPYQQAFLSVQALLHNSSLWIGLFSQDDELNFGWSDGKRLHFSRWAETNGQLEDCVVLDTDGFWKTVDCNDNQPGAICYYSGNETEKEVKPVDSVKCPSPVLNTPWIPFQNCCYNFIITKNRHMATTQDEVHTKCQKLNPKSHILSIRDEKENNFVLEQLLYFNYMASWVMLGITYRNKSLMWFDKTPLSYTHWRAGRPTIKNEKFLAGLSTDGFWDIQTFKVIEEAVYFHQHSILACKIEMVDYKEEYNTTLPQFMPYEDGIYSVIQKKVTWYEALNMCSQSGGHLASVHNQNGQLFLEDIVKRDGFPLWVGLSSHDGSESSFEWSDGSTFDYIPWKGQTSPGNCVLLDPKGTWKHEKCNSVKDGAICYKPTKSKKLSRLTYSSRCPAAKENGSRWIQYKGHCYKSDQALHSFSEAKKLCSKHDHSATIVSIKDEDENKFVSRLMRENNNITMRVWLGLSQHSVDQSWSWLDGSEVTFVKWENKSKSGVGRCSMLIASNETWKKVECEHGFGRVVCKVPLGPDYTAIAIIVATLSILVLMGGLIWFLFQRHRLHLAGFSSVRYAQGVNEDEIMLPSFHD

SEQ ID NO: 70 - protein, 864 aa, Homo sapiens
MGCWGQLLVWFGAAGAILCSSPGSQETFLRSSPLPLASPSPRDPKVSAPPSILEPASPLNSPGTEGSWLFSTCGASGRHGPTQTQCDGAYAGTSVVVTVGAAGQLRGVQLWRVPGPGQYLISAYGAAGGKGAKNHLSRAHGVFVSAIFSLGLGESLYILVGQQGEDACPGGSPESQLVCLGESRAVEEHAAMDGSEGVPGSRRWAGGGGGGGGATYVFRVRAGELEPLLVAAGGGGRAYLRPRDRGRTQASPEKLENRSEAPGSGGRGGAAGGGGGWTSRAPSPQAGRSLQEGAEGGQGCSEAWATLGWAAAGGFGGGGGACTAGGGGGGYRGGDASETDNLWADGEDGVSFIHPSSELFLQPLAVTENHGEVEIRRHLNCSHCPLRDCQWQAELQLAECLCPEGMELAVDNVTCMDLHKPPGPLVLMVAVVATSTLSLLMVCGVLILVKQKKWQGLQEMRLPSPELELSKLRTSAIRTAPNPYYCQVGLGPAQSWPLPPGVTEVSPANVTLLRALGHGAFGEVYEGLVIGLPGDSSPLQVAIKTLPELCSPQDELDFLMEALIISKFRHQNIVRCVGLSLRATPRLILLELMSGGDMKSFLRHSRPHLGQPSPLVMRDLLQLAQDIAQGCHYLEENHFIHRDIAARNCLLSCAGPSRVAKIGDFGMARDIYRASYYRRGDRALLPVKWMPPEAFLEGIFTSKTDSWSFGVLLWEIFSLGYMPYPGRTNQEVLDFVVGGGRMDPPRGCPGPVYRIMTQCWQHEPELRPSFASILERLQYCTQDPDVLNSLLPMELGPTPEEEGTSGLGNRSLECLRPPQPQELSPEKLKSWGGSPLGPWLSSGLKPLKSRGLQPQNLWNPTYRS

SEQ ID NO: 71 - protein, 595 aa, Homo sapiens
MRVLLAALGLLFLGALRAFPQDRPFEDTCHGNPSHYYDKAVRRCCYRCPMGLFPTQQCPQRPTDCRKQCEPDYYLDEADRCTACVTCSRDDLVEKTPCAWNSSRVCECRPGMFCSTSAVNSCARCFFHSVCPAGMIVKFPGTAQKNTVCEPASPGVSPACASPENCKEPSSGTIPQAKPTPVSPATSSASTMPVRGGTRLAQEAASKLTRAPDSPSSVGRPSSDPGLSPTQPCPEGSGDCRKQCEPDYYLDEAGRCTACVSCSRDDLVEKTPCAWNSSRTCECRPGMICATSATNSCARCVPYPICAAETVTKPQDMAEKDTTFEAPPLGTQPDCNPTPENGEAPASTSPTQSLLVDSQASKTLPIPTSAPVALSSTGKPVLDAGPVLFWVILVLVVVVGSSAFLLCHRRACRKRIRQKLHLCYPVQTSQPKLELVDSRPRRSSTQLRSGASVTEPVAEERGLMSQPLMETCHSVGAAYLESLPLQDASPAGGPSSPRDLPEPRVSTEHTNNKIEKIYIMKADTVIVGTVKAELPEGRGLAGPAEPELEEELEADHTPHYPEQETEPPLGSCSDVMLSVEEEGKEDPLPTAASGK

SEQ ID NO: 72 - protein, 517 aa, Homo sapiens
MARMGLAGAAGRWWGLALGLTAFFLPGVHSQVVQVNDSMYGFIGTDVVLHCSFANPLPSVKITQVTWQKSTNGSKQNVAIYNPSMGVSVLAPYRERVEFLRPSFTDGTIRLSRLELEDEGVYICEFATFPTGNRESQLNLTVMAKPTNWIEGTQAVLRAKKGQDDKVLVATCTSANGKPPSVVSWETRLKGEAEYQEIRNPNGTVTVISRYRLVPSREAHQQSLACIVNYHMDRFKESLTLNVQYEPEVTIEGFDGNWYLQRMDVKLTCKADANPPATEYHWTTLNGSLPKGVEAQNRTLFFKGPINYSLAGTYICEATNPIGTRSGQVEVNITEFPYTPSPPEHGRRAGPVPTAIIGGVAGSILLVLIVVGGIVVALRRRRHTFKGDYSTKKHVYGNGYSKAGIPQHHPPMAQNLQYPDDSDDEKKAGPLGGSSYEEEEEEEEGGGGGERKVGGPHPKYDEDAKRPYFTVDEAEARQDGYGDRTLGYQYDPEQLDLAENMVSQNDGSFISKKEWYV

SEQ ID NO: 73 - protein, 1073 aa, Homo sapiens
MAAAGQLCLLYLSAGLLSRLGAAFNLDTREDNVIRKYGDPGSLFGFSLAMHWQLQPEDKRLLLVGAPRAEALPLQRANRTGGLYSCDITARGPCTRIEFDNDADPTSESKEDQWMGVTVQSQGPGGKVVTCAHRYEKRQHVNTKQESRDIFGRCYVLSQNLRIEDDMDGGDWSFCDGRLRGHEKFGSCQQGVAATFTKDFHYIVFGAPGTYNWKGIVRVEQKNNTFFDMNIFEDGPYEVGGETEHDESLVPVPANSYLGFSLDSGKGIVSKDEITFVSGAPRANHSGAVVLLKRDMKSAHLLPEHIFDGEGLASSFGYDVAVVDLNKDGWQDIVIGAPQYFDRDGEVGGAVYVYMNQQGRWNNVKPIRLNGTKDSMFGIAVKNIGDINQDGYPDIAVGAPYDDLGKVFIYHGSANGINTKPTQVLKGISPYFGYSIAGNMDLDRNSYPDVAVGSLSDSVTIFRSRPVINIQKTITVTPNRIDLRQKTACGAPSGICLQVKSCFEYTANPAGYNPSISIVGTLEAEKERRKSGLSSRVQFRNQGSEPKYTQELTLKRQKQKVCMEETLWLQDNIRDKLRPIPITASVEIQEPSSRRRVNSLPEVLPILNSDEPKTAHIDVHFLKEGCGDDNVCNSNLKLEYKFCTREGNQDKFSYLPIQKGVPELVLKDQKDIALEITVTNSPSNPRNPTKDGDDAHEAKLIATFPDTLTYSAYRELRAFPEKQLSCVANQNGSQADCELGNPFKRNSNVTFYLVLSTTEVTFDTPDLDINLKLETTSNQDNLAPITAKAKVVIELLLSVSGVAKPSQVYFGGTVVGEQAMKSEDEVGSLIEYEFRVINLGKPLTNLGTATLNIQWPKEISNGKWLLYLVKVESKGLEKVTCEPQKEINSLNLTESHNSRKKREITEKQIDDNRKFSLFAERKYQTLNCSVNVNCVNIRCPLRGLDSKASLILRSRLWNSTFLEEYSKLNYLDILMRAFIDVTAAAENIRLPNAGTQVRVTVFPSKTVAQYSGVPWWIILVAILAGILMLALLVFILWKCGFFKRNKKDHYDATYHKAEIHAQPSDKERLTSDA

SEQ ID NO: 74 - protein, 288 aa, Homo sapiens
MGHTRRQGTSPSKCPYLNFFQLLVLAGLSHFCSGVIHVTKEVKEVATLSCGHNVSVEELAQTRIYWQKEKKMVLTMMSGDMNIWPEYKNRTIFDITNNLSIVILALRPSDEGTYECVVLKYEKDAFKREHLAEVTLSVKADFPTPSISDFEIPTSNIRRIICSTSGGFPEPHLSWLENGEELNAINTTVSQDPETELYAVSSKLDFNMTTNHSFMCLIKYGHLRVNQTFNWNTTKQEHFPDNLLPSWAITLISVNGIFVICCLTYCFAPRCRERRRNERLRRESVRPV

SEQ ID NO: 75 - protein, 599 aa, Homo sapiens
MLCLGWIFLWLVAGERIKGFNISGCSTKKLLWTYSTRSEEEFVLFCDLPEPQKSHFCHRNRLSPKQVPEHLPFMGSNDLSDVQWYQQPSNGDPLEDIRKSYPHIIQDKCTLHFLTPGVNNSGSYICRPKMIKSPYDVACCVKMILEVKPQTNASCEYSASHKQDLLLGSTGSISCPSLSCQSDAQSPAVTWYKNGKLLSVERSNRIVVDEVYDYHQGTYVCDYTQSDTVSSWTVRAVVQVRTIVGDTKLKPDILDPVEDTLEVELGKPLTISCKARFGFERVFNPVIKWYIKDSDLEWEVSVPEAKSIKSTLKDEIIERNIILEKVTQRDLRRKFVCFVQNSIGNTTQSVQLKEKRGVVLLYILLGTIGTLVAVLAASALLYRHWIEIVLLYRTYQSKDQTLGDKKDFDAFVSYAKWSSFPSEATSSLSEEHLALSLFPDVLENKYGYSLCLLERDVAPGGVYAEDIVSIIKRSRRGIFILSPNYVNGPSIFELQAAVNLALDDQTLKLILIKFCYFQEPESLPHLVKKALRVLPTVTWRGLKSVPPNSRFWAKMRYHMPVKNSQGFTWNQLRITSRIFQWKGLSRTETTGRSSQPKEW

SEQ ID NO: 76 - protein, 275 aa, Homo sapiens
MGLSNILFVMAFLLSGAAPLKIQAYFNETADLPCQFANSQNQSLSELVVFWQDQENLVLNEVYLGKEKFDSVHSKYMGRTSFDSDSWTLRLHNLQIKDKGLYQCIIHHKKPTGMIRIHQMNSELSVLANFSQPEIVPISNITENVYINLTCSSIHGYPEPKKMSVLLRTKNSTIEYDGVMQKSQDNVTELYDVSISLSVSFPDVTSNMTIFCILETDKTRLLSSPFSIGTNTMEREESEQTKKREKIHIPERSDEAQRVFKSSKTSSCDKSDTCF

SEQ ID NO: 77 - protein, 1384 aa, Homo sapiens
MMHLRLFCILLAAVSGAEGWGYYGCDEELVGPLYARSLGASSYYSLLTAPRFARLHGISGWSPRIGDPNPWLQIDLMKKHRIRAVATQGSFNSWDWVTRYMLLYGDRVDSWTPFYQRGHNSTFFGNVNESAVVRHDLHFHFTARYIRIVPLAWNPRGKIGLRLGLYGCPYKADILYFDGDDAISYRFPRGVSRSLWDVFAFSFKTEEKDGLLLHAEGAQGDYVTLELEGAHLLLHMSLGSSPIQPRPGHTTVSAGGVLNDQHWHYVRVDRFGRDVNFTLDGYVQRFILNGDFERLNLDTEMFIGGLVGAARKNLAYRHNFRGCIENVIFNRVNIADLAVRRHSRITFEGKVAFRCLDPVPHPINFGGPHNFVQVPGFPRRGRLAVSFRFRTWDLTGLLLFSRLGDGLGHVELTLSEGQVNVSIAQSGRKKLQFAAGYRLNDGFWHEVNFVAQENHAVISIDDVEGAEVRVSYPLLIRTGTSYFFGGCPKPASRWDCHSNQTAFHGCMELLKVDGQLVNLTLVEGRRLGFYAEVLFDTCGITDRCSPNMCEHDGRCYQSWDDFICYCELTGYKGETCHTPLYKESCEAYRLSGKTSGNFTIDPDGSGPLKPFVVYCDIRENRAWTVVRHDRLWTTRVTGSSMERPFLGAIQYWNASWEEVSALANASQHCEQWIEFSCYNSRLLNTAGGYPYSFWIGRNEEQHFYWGGSQPGIQRCACGLDRSCVDPALYCNCDADQPQWRTDKGLLTFVDHLPVTQVVIGDTNRSTSEAQFFLRPLRCYGDRNSWNTISFHTGAALRFPPIRANHSLDVSFYFRTSAPSGVFLENMGGPYCQWRRPYVRVELNTSRDVVFAFDVGNGDENLTVHSDDFEFNDDEWHLVRAEINVKQARLRVDHRPWVLRPMPLQTYIWMEYDQPLYVGSAELKRRPFVGCLRAMRLNGVTLNLEGRANASEGTSPNCTGHCAHPRLPCFHGGRCVERYSYYTCDCDLTAFDGPYCNHDIGGFFEPGTWMRYNLQSALRSAAREFSHMLSRPVPGYEPGYIPGYDTPGYVPGYHGPGYRLPDYPRPGRPVPGYRGPVYNVTGEEVSFSFSTSSAPAVLLYVSSFVRDYMAVLIKDDGTLQLRYQLGTSPYVYQLTTRPVTDGQPHSINITRVYRNLFIQVDYFPLTEQKFSLLVDSQLDSPKALYLGRVMETGVIDPEIQRYNTPGFSGCLSGVRFNNVAPLKTHFRTPRPMTAELAEALRVQGELSESNCGAMPRLVSEVPPELDPWYLPPDFPYYHDEGWVAILLGFLVAFLLLGLVGMLVLFYLQNHRYKGSYHTNEPKAAHEYHPGSKPPLPTSGPAQVPTPTAAPNQAPASAPAPAPTPAPAPGPRDQNLPQILEESRSE

SEQ ID NO: 78 - protein, 1228 aa, Homo sapiens
MKGARLFVLLSSLWSGGIGLNNSKHSWTIPEDGNSQKTMPSASVPPNKIQSLQILPTTRVMSAEIATTPEARTSEDSLLKSTLPPSETSAPAEGVRNQTLTSTEKAEGVVKLQNLTLPTNASIKFNPGAESVVLSNSTLKFLQSFARKSNEQATSLNTVGGTGGIGGVGGTGGVGNRAPRETYLSRGDSSSSQRTDYQKSNFETTRGKNWCAYVHTRLSPTVILDNQVTYVPGGKGPCGWTGGSCPQRSQKISNPVYRMQHKIVTSLDWRCCPGYSGPKCQLRAQEQQSLIHTNQAESHTAVGRGVAEQQQQQGCGDPEVMQKMTDQVNYQAMKLTLLQKKIDNISLTVNDVRNTYSSLEGKVSEDKSREFQSLLKGLKSKSINVLIRDIVREQFKIFQNDMQETVAQLFKTVSSLSEDLESTRQIIQKVNESVVSIAAQQKFVLVQENRPTLTDIVELRNHIVNVRQEMTLTCEKPIKELEVKQTHLEGALEQEHSRSILYYESLNKTLSKLKEVHEQLLSTEQVSDQKNAPAAESVSNNVTEYMSTLHENIKKQSLMMLQMFEDLHIQESKINNLTVSLEMEKESLRGECEDMLSKCRNDFKFQLKDTEENLHVLNQTLAEVLFPMDNKMDKMSEQLNDLTYDMEILQPLLEQGASLRQTMTYEQPKEAIVIRKKIENLTSAVNSLNFIIKELTKRHNLLRNEVQGRDDALERRINEYALEMEDGLNKTMTIINNAIDFIQDNYALKETLSTIKDNSEIHHKCTSDMETILTFIPQFHRLNDSIQTLVNDNQRYNFVLQVAKTLAGIPRDEKLNQSNFQKMYQMFNETTSQVRKYQQNMSHLEEKLLLTTKISKNFETRLQDIESKVTQTLIPYYISVKKGSVVTNERDQALQLQVLNSRFKALEAKSIHLSINFFSLNKTLHEVLTMCHNASTSVSELNATIPKWIKHSLPDIQLLQKGLTEFVEPIIQIKTQAALSNLTCCIDRSLPGSLANVVKSQKQVKSLPKKINALKKPTVNLTTVLIGRTQRNTDNIIYPEEYSSCSRHPCQNGGTCINGRTSFTCACRHPFTGDNCTIKLVEENALAPDFSKGSYRYAPMVAFFASHTYGMTIPGPILFNNLDVNYGASYTPRTGKFRIPYLGVYVFKYTIESFSAHISGFLVVDGIDKLAFESENINSEIHCDRVLTGDALLELNYGQEVWLRLAKGTIPAKFPPVTTFSGYLLYRT

SEQ ID NO: 79 - protein, 1745 aa, Homo sapiens
MGNRRDLGQPRAGLCLLLAALQLLPGTQADPVDVLKALGVQGGQAGVPEGPGFCPQRTPEGDRAFRIGQASTLGIPTWELFPEGHFPENFSLLITLRGQPANQSVLLSIYDERGARQLGLALGPALGLLGDPFRPLPQQVNLTDGRWHRVAVSIDGEMVTLVADCEAQPPVLGHGPRFISIAGLTVLGTQDLGEKTFEGDIQELLISPDPQAAFQACERYLPDCDNLAPAATVAPQGEPETPRPRRKGKGKGRKKGRGRKGKGRKKNKEIWTSSPPPDSAENQTSTDIPKTETPAPNLPPTPTPLVVTSTVTTGLNATILERSLDPDSGTELGTLETKAAREDEEGDDSTMGPDFRAAEYPSRTQFQIFPGAGEKGAKGEPAVIEKGQQFEGPPGAPGPQGVVGPSGPPGPPGFPGDPGPPGPAGLPGIPGIDGIRGPPGTVIMMPFQFAGGSFKGPPVSFQQAQAQAVLQQTQLSMKGPPGPVGLTGRPGPVGLPGHPGLKGEEGAEGPQGPRGLQGPHGPPGRVGKMGRPGADGARGLPGDTGPKGDRGFDGLPGLPGEKGQRGDFGHVGQPGPPGEDGERGAEGPPGPTGQAGEPGPRGLLGPRGSPGPTGRPGVTGIDGAPGAKGNVGPPGEPGPPGQQGNHGSQGLPGPQGLIGTPGEKGPPGNPGIPGLPGSDGPLGHPGHEGPTGEKGAQGPPGSAGPPGYPGPRGVKGTSGNRGLQGEKGEKGEDGFPGFKGDVGLKGDQGKPGAPGPRGEDGPEGPKGQAGQAGEEGPPGSAGEKGKLGVPGLPGYPGRPGPKGSIGFPGPLGPIGEKGKSGKTGQPGLEGERGPPGSRGERGQPGATGQPGPKGDVGQDGAPGIPGEKGLPGLQGPPGFPGPKGPPGHQGKDGRPGHPGQRGELGFQGQTGPPGPAGVLGPQGKTGEVGPLGERGPPGPPGPPGEQGLPGLEGREGAKGELGPPGPLGKEGPAGLRGFPGPKGGPGDPGPTGLKGDKGPPGPVGANGSPGERGPLGPAGGIGLPGQSGSEGPVGPAGKKGSRGERGPPGPTGKDGIPGPLGPLGPPGAAGPSGEEGDKGDVGAPGHKGSKGDKGDAGPPGQPGIRGPAGHPGPPGADGAQGRRGPPGLFGQKGDDGVRGFVGVIGPPGLQGLPGPPGEKGEVGDVGSMGPHGAPGPRGPQGPTGSEGTPGLPGGVGQPGAVGEKGERGDAGDPGPPGAPGIPGPKGDIGEKGDSGPSGAAGPPGKKGPPGEDGAKGSVGPTGLPGDLGPPGDPGVSGIDGSPGEKGDPGDVGGPGPPGASGEPGAPGPPGKRGPSGHMGREGREGEKGAKGEPGPDGPPGRTGPMGARGPPGRVGPEGLRGIPGPVGEPGLLGAPGQMGPPGPLGPSGLPGLKGDTGPKGEKGHIGLIGLIGPPGEAGEKGDQGLPGVQGPPGPKGDPGPPGPIGSLGHPGPPGVAGPLGQKGSKGSPGSMGPRGDTGPAGPPGPPGAPAELHGLRRRRRFVPVPLPVVEGGLEEVLASLTSLSLELEQLRRPPGTAERPGLVCHELHRNHPHLPDGEYWIDPNQGCARDSFRVFCNFTAGGETCLYPDKKFEIVKLASWSKEKPGGWYSTFRRGKKFSYVDADGSPVNVVQLNFLKLLSATARQNFTYSCQNAAAWLDEATGDYSHSARFLGTNGEELSFNQTTAATVSVPQDGCRLRKGQTKTLFEFSSSRAGFLPLWDVAATDFGQTNQKFGFELGPVCFSS

SEQ ID NO: 80 - protein, 532 aa, Homo sapiens
MAPSSPRPALPALLVLLGALFPGPGNAQTSVSPSKVILPRGGSVLVTCSTSCDQPKLLGIETPLPKKELLLPGNNRKVYELSNVQEDSQPMCYSNCPDGQSTAKTFLTVYWTPERVELAPLPSWQPVGKNLTLRCQVEGGAPRANLTVVLLRGEKELKREPAVGEPAEVTTTVLVRRDHHGANFSCRTELDLRPQGLELFENTSAPYQLQTFVLPATPPQLVSPRVLEVDTQGTVVCSLDGLFPVSEAQVHLALGDQRLNPTVTYGNDSFSAKASVSVTAEDEGTQRLTCAVILGNQSQETLQTVTIYSFPAPNVILTKPEVSEGTEVTVKCEAHPRAKVTLNGVPAQPLGPRAQLLLKATPEDNGRSFSCSATLEVAGQLIHKNQTRELRVLYGPRLDERDCPGNWTWPENSQQTPMCQAWGNPLPELKCLKDGTFPLPIGESVTVTRDLEGTYLCRARSTQGEVTRKVTVNVLSPRYEIVIITVVAAAVIMGTAGLSTYLYNRQRKIKKYRLQQAQKGTPMKPNTQATPP

SEQ ID NO: 81 - protein, 476 aa, Homo sapiens
MVGAMWKVIVSLVLLMPGPCDGLFRSLYRSVSMPPKGDSGQPLFLTPYIEAGKIQKGRELSLVGPFPGLNMKSYAGFLTVNKTYNSNLFFWFFPAQIQPEDAPVVLWLQGGPGGSSMFGLFVEHGPYVVTSNMTLRDRDFPWTTTLSMLYIDNPVGTGFSFTDDTHGYAVNEDDVARDLYSALIQFFQIFPEYKNNDFYVTGESYAGKYVPAIAHLIHSLNPVREVKINLNGIAIGDGYSDPESIIGGYAEFLYQIGLLDEKQKKYFQKQCHECIEHIRKQNWFEAFEILDKLLDGDLTSDPSYFQNVTGCSNYYNFLRCTEPEDQLYYVKFLSLPEVRQAIHVGNQTFNDGTIVEKYLREDTVQSVKPWLTEIMNNYKVLIYNGQLDIIVAAALTERSLMGMDWKGSQEYKKAEKKVWKIFKSDSEVAGYIRQAGDFHQVIIRGGGHILPYDQPLRAFDMINRFIYGKGWDPYVG

SEQ ID NO: 82 - protein, 416 aa, Homo sapiens
MPRQLSAAAALFASLAVILHDGSQMRAKAFPETRDYSQPTAAATVQDIKKPVQQPAKQAPHQTLAARFMDGHITFQTAATVKIPTTTPATTKNTATTSPITYTLVTTQATPNNSHTAPPVTEVTVGPSLAPYSLPPTITPPAHTTGTSSSTVSHTTGNTTQPSNQTTLPATLSIALHKSTTGQKPVQPTHAPGTTAAAHNTTRTAAPASTVPGPTLAPQPSSVKTGIYQVLNGSRLCIKAEMGIQLIVQDKESVFSPRRYFNIDPNATQASGNCGTRKSNLLLNFQGGFVNLTFTKDEESYYISEVGAYLTVSDPETIYQGIKHAVVMFQTAVGHSFKCVSEQSLQLSAHLQVKTTDVQLQAFDFEDDHFGNVDECSSDYTIVLPVIGAIVVGLCLMGMGVYKIRLRCQSSGYQRI

SEQ ID NO: 83 - protein, 123 aa, Homo sapiens
MARGSALLLASLLLAAALSASAGLWSPAKEKRGWTLNSAGYLLGPHAVGNHRSFSDKNGLTSKRELRPEDDMKPGSFDRSIPENNIMRTIIEFLSFLHLKEAGALDRLLDLPAAASSEDIERS

SEQ ID NO: 84 - protein, 317 aa, Homo sapiens
MRAAAAGGGVRTAALALLLGALHWAPARCEEYDYYGWQAEPLHGRSYSKPPQCLDIPADLPLCHTVGYKRMRLPNLLEHESLAEVKQQASSWLPLLAKRCHSDTQVFLCSLFAPVCLDRPIYPCRSLCEAVRAGCAPLMEAYGFPWPEMLHCHKFPLDNDLCIAVQFGHLPATAPPVTKICAQCEMEHSADGLMEQMCSSDFVVKMRIKEIKIENGDRKLIGAQKKKKLLKPGPLKRKDTKRLVLHMKNGAGCPCPQLDSLAGSFLVMGRKVDGQLLLMAVYRWDKKNKEMKFAVKFMFSYPCSLYYPFFYGAAEPH

SEQ ID NO: 85 - protein, 956 aa, Homo sapiens
MTLLLLPLLLASLLASCSCNKANKHKPWIEAEYQGIVMENDNTVLLNPPLFALDKDAPLRYAGEICGFRLHGSGVPFEAVILDKATGEGLIRAKEPVDCEAQKEHTFTIQAYDCGEGPDGANTKKSHKATVHVRVNDVNEFAPVFVERLYRAAVTEGKLYDRILRVEAIDGDCSPQYSQICYYEILTPNTPFLIDNDGNIENTEKLQYSGERLYKFTVTAYDCGKKRAADDAEVEIQVKPTCKPSWQGWNKRIEYAPGAGSLALFPGIRLETCDEPLWNIQATIELQTSHVAKGCDRDNYSERALRKLCGAATGEVDLLPMPGPNANWTAGLSVHYSQDSSLIYWFNGTQAVQVPLGGPSGLGSGPQDSLSDHFTLSFWMKHGVTPNKGKKEEETIVCNTVQNEDGFSHYSLTVHGCRIAFLYWPLLESARPVKFLWKLEQVCDDEWHHYALNLEFPTVTLYTDGISFDPALIHDNGLIHPPRREPALMIGACWTEEKNKEKEKGDNSTDTTQGDPLSIHHYFHGYLAGFSVRSGRLESREVIECLYACREGLDYRDFESLGKGMKVHVNPSQSLLTLEGDDVETFNHALQHVAYMNTLRFATPGVRPLRLTTAVKCFSEESCVSIPEVEGYVVVLQPDAPQILLSGTAHFARPAVDFEGTNGVPLFPDLQITCSISHQVEAKKDESWQGTVTDTRMSDEIVHNLDGCEISLVGDDLDPERESLLLDTTSLQQRGLELTNTSAYLTIAGVESITVYEEILRQARYRLRHGAALYTRKFRLSCSEMNGRYSSNEFIVEVNVLHSMNRVAHPSHVLSSQQFLHRGHQPPPEMAGHSLASSHRNSMIPSAATLIIVVCVGFLVLMVVLGLVRIHSLHRRVSGAGGPPGASSDPKDPDLFWDDSALTIIVNPMESYQNRQSCVTGAVGGQQEDEDSSDSEVADSPSSDERRIIETPPHRY

SEQ ID NO: 86 - protein, 266 aa, Homo sapiens
MRVTLATIAWMVSFVSNYSHTANILPDIENEDFIKDCVRIHNKFRSEVKPTASDMLYMTWDPALAQIAKAWASNCQFSHNTRLKPPHKLHPNFTSLGENIWTGSVPIFSVSSAITNWYDEIQDYDFKTRICKKVCGHYTQVVWADSYKVGCAVQFCPKVSGFDALSNGAHFICNYGPGGNYPTWPYKRGATCSACPNNDKCLDNLCVNRQRDQVKRYYSVVYPGWPIYPRNRYTSLFLIVNSVILILSVIITILVQHKYPNLVLLD

SEQ ID NO: 87 - protein, 1342 aa, Homo sapiens
MRANDALQVLGLLFSLARGSEVGNSQAVCPGTLNGLSVTGDAENQYQTLYKLYERCEVVMGNLEIVLTGHNADLSFLQWIREVTGYVLVAMNEFSTLPLPNLRVVRGTQVYDGKFAIFVMLNYNTNSSHALRQLRLTQLTEILSGGVYIEKNDKLCHMDTIDWRDIVRDRDAEIVVKDNGRSCPPCHEVCKGRCWGPGSEDCQTLTKTICAPQCNGHCFGPNPNQCCHDECAGGCSGPQDTDCFACRHFNDSGACVPRCPQPLVYNKLTFQLEPNPHTKYQYGGVCVASCPHNFVVDQTSCVRACPPDKMEVDKNGLKMCEPCGGLCPKACEGTGSGSRFQTVDSSNIDGFVNCTKILGNLDFLITGLNGDPWHKIPALDPEKLNVFRTVREITGYLNIQSWPPHMHNFSVFSNLTTIGGRSLYNRGFSLLIMKNLNVTSLGFRSLKEISAGRIYISANRQLCYHHSLNWTKVLRGPTEERLDIKHNRPRRDCVAEGKVCDPLCSSGGCWGPGPGQCLSCRNYSRGGVCVTHCNFLNGEPREFAHEAECFSCHPECQPMEGTATCNGSGSDTCAQCAHFRDGPHCVSSCPHGVLGAKGPIYKYPDVQNECRPCHENCTQGCKGPELQDCLGQTLVLIGKTHLTMALTVIAGLVVIFMMLGGTFLYWRGRRIQNKRAMRRYLERGESIEPLDPSEKANKVLARIFKETELRKLKVLGSGVFGTVHKGVWIPEGESIKIPVCIKVIEDKSGRQSFQAVTDHMLAIGSLDHAHIVRLLGLCPGSSLQLVTQYLPLGSLLDHVRQHRGALGPQLLLNWGVQIAKGMYYLEEHGMVHRNLAARNVLLKSPSQVQVADFGVADLLPPDDKQLLYSEAKTPIKWMALESIHFGKYTHQSDVWSYGVTVWELMTFGAEPYAGLRLAEVPDLLEKGERLAQPQICTIDVYMVMVKCWMIDENIRPTFKELANEFTRMARDPPRYLVIKRESGPGIAPGPEPHGLTNKKLEEVELEPELDLDLDLEAEEDNLATTTLGSALSLPVGTLNRPRGSQSLLSPSSGYMPMNQGNLGESCQESAVSGSSERCPRPVSLHPMPRGCLASESSEGHVTGSEAELQEKVSMCRSRSRSRSPRPRGDSAYHSQRHSLLTPVTPLSPPGLEEEDVNGYVMPDTHLKGTPSSREGTLSSVGLSSVLGTEEEDEDEEYEYMNRRRRHSPPHPPRPSSLEELGYEYMDVGSDLSASLGSTQSCPLHPVPIMPTAGTTPDEDYEYMNRQRDGGGPGGDYAAMGACPASEQGYEEMRAFQGPGHQAPHVHYARLKTLRSLEATDSAFDNPDYWHSRLFPKANAQRT

SEQ ID NO: 88 - protein, 387 aa, Homo sapiens
MPRPRLLAALCGALLCAPSLLVALDICSKNPCHNGGLCEEISQEVRGDVFPSYTCTCLKGYAGNHCETKCVEPLGLENGNIANSQIAASSVRVTFLGLQHWVPELARLNRAGMVNAWTPSSNDDNPWIQVNLLRRMWVTGVVTQGASRLASHEYLKAFKVAYSLNGHEFDFIHDVNKKHKEFVGNWNKNAVHVNLFETPVEAQYVRLYPTSCHTACTLRFELLGCELNGCANPLGLKNNSIPDKQITASSSYKTWGLHLFSWNPSYARLDKQGNFNAWVAGSYGNDQWLQVDLGSSKEVTGIITQGARNFGSVQFVASYKVAYSNDSANWTEYQDPRTGSSKIFPGNWDNHSHKKNLFETPILARYVRILPVAWHNRIALRLELLGC

SEQ ID NO: 89 - protein, 335 aa, Homo sapiens
MPRPRLLAALCGALLCAPSLLVALDICSKNPCHNGGLCEEISQEVRGDVFPSYTCTCLKGYAGNHCETKCVEPLGLENGNIANSQIAASSVRVTFLGLQHWVPELARLNRAGMVNAWTPSSNDDNPWIQVNLLRRMWVTGVVTQGASRLASHEYLKAFKVAYSLNGHEFDFIHDVNKKHKEFVGNWNKNAVHVNLFETPVEAQYVRLYPTSCHTACTLRFELLGCELNGCANPLGLKNNSIPDKQITASSSYKTWGLHLFSWNPSYARLDKQGNFNAWVAGSYGNDQWLQIFPGNWDNHSHKKNLFETPILARYVRILPVAWHNRIALRLELLGC

SEQ ID NO: 90 - protein, 1163 aa, Homo sapiens
MTRTRAALLLFTALATSLGFNLDTEELTAFRVDSAGFGDSVVQYANSWVVVGAPQKITAANQTGGLYQCGYSTGACEPIGLQVPPEAVNMSLGLSLASTTSPSQLLACGPTVHHECGRNMYLTGLCFLLGPTQLTQRLPVSRQECPRQEQDIVFLIDGSGSISSRNFATMMNFVRAVISQFQRPSTQFSLMQFSNKFQTHFTFEEFRRSSNPLSLLASVHQLQGFTYTATAIQNVVHRLFHASYGARRDAAKILIVITDGKKEGDSLDYKDVIPMADAAGIIRYAIGVGLAFQNRNSWKELNDIASKPSQEHIFKVEDFDALKDIQNQLKEKIFAIEGTETTSSSSFELEMAQEGFSAVFTPDGPVLGAVGSFTWSGGAFLYPPNMSPTFINMSQENVDMRDSYLGYSTELALWKGVQSLVLGAPRYQHTGKAVIFTQVSRQWRMKAEVTGTQIGSYFGASLCSVDVDSDGSTDLVLIGAPHYYEQTRGGQVSVCPLPRGWRRWWCDAVLYGEQGHPWGRFGAALTVLGDVNGDKLTDVVIGAPGEEENRGAVYLFHGVLGPSISPSHSQRIAGSQLSSRLQYFGQALSGGQDLTQDGLVDLAVGARGQVLLLRTRPVLWVGVSMQFIPAEIPRSAFECREQVVSEQTLVQSNICLYIDKRSKNLLGSRDLQSSVTLDLALDPGRLSPRATFQETKNRSLSRVRVLGLKAHCENFNLLLPSCVEDSVTPITLRLNFTLVGKPLLAFRNLRPMLAADAQRYFTASLPFEKNCGADHICQDNLGISFSFPGLKSLLVGSNLELNAEVMVWNDGEDSYGTTITFSHPAGLSYRYVAEGQKQGQLRSLHLTCDSAPVGSQGTWSTSCRINHLIFRGGAQITFLATFDVSPKAVLGDRLLLTANVSSENNTPRTSKTTFQLELPVKYAVYTVVSSHEQFTKYLNFSESEEKESHVAMHRYQVNNLGQRDLPVSINFWVPVELNQEAVWMDVEVSHPQNPSLRCSSEKIAPPASDFLAHIQKNPVLDCSIAGCLRFRCDVPSFSVQEELDFTLKGNLSFGWVRQILQKKVSVVSVAEITFDTSVYSQLPGQEAFMRAQTTTVLEKYKVHNPTPLIVGSSIGGLLLLALITAVLYKVGFFKRQYKEMMEEANGQIAPENGTQTPSPPSEK

SEQ ID NO: 91 - protein, 248 aa, Homo sapiens
MQTCPLAFPGHVSQALGTLLFLAASLSAQNEGWDSPICTEGVVSVSWGENTVMSCNISNAFSHVNIKLRAHGQESAIFNEVAPGYFSRDGWQLQVQGGVAQLVIKGARDSHAGLYMWHLVGHQRNNRQVTLEVSGAEPQSAPDTGFWPVPAVVTAVFILLVALVMFAWYRCRCSQQRREKKFFLLEPQMKVAALRAGAQQGLSRASAELWTPDSEPTPRPLALVFKPSPLGALELLSPQPLFPYAADP

SEQ ID NO: 92 - protein, 299 aa, Homo sapiens
MAPRARRRRPLFALLLLCALLARLQVALQIAPPCTSEKHYEHLGRCCNKCEPGKYMSSKCTTTSDSVCLPCGPDEYLDSWNEEDKCLLHKVCDTGKALVAVVAGNSTTPRRCACTAGYHWSQDCECCRRNTECAPGLGAQHPLQLNKDTVCKPCLAGYFSDAFSSTDKCRPWTNCTFLGKRVEHHGTEKSDAVCSSSLPARKPPNGNVTGNSNSTFISSGQVMNFKGDIIVVYVSQTSQEGAAAAAEPMGRPVQEETLARRDSFAGNGPRFPDPCGGPEGLREPEKASRPVQEQGGAKA

SEQ ID NO: 93 - protein, 1255 aa, Homo sapiens [sequence omitted]

SEQ ID NO: 94 - protein, 1103 aa, Homo sapiens
MAPACQILRWALALGLGLMFEVTHAFRSQDEFLSSLESYEIAFPTRVDHNGALLAFSPPPPRRQRRGTGATAESRLFYKVASPSTHFLLNLTRSSRLLAGHVSVEYWTREGLAWQRAARPHCLYAGHLQGQASSSHVAISTCGGLHGLIVADEEEYLIEPLHGGPKGSRSPEESGPHVVYKRSSLRHPHLDTACGVRDEKPWKGRPWWLRTLKPPPARPLGNETERGQPGLKRSVSRERYVETLVVADKMMVAYHGRRDVEQYVLAIMNIVAKLFQDSSLGSTVNILVTRLILLTEDQPTLEITHHAGKSLDSFCKWQKSIVNHSGHGNAIPENGVANHDTAVLITRYDICIYKNKPCGTLGLAPVGGMCERERSCSVNEDIGLATAFTIAHEIGHTFGMNHDGVGNSCGARGQDPAKLMAAHITMKTNPFVWSSCSRDYITSFLDSGLGLCLNNRPPRQDFVYPTVAPGQAYDADEQCRFQHGVKSRQCKYGEVCSELWCLSKSNRCITNSIPAAEGTLCQTHTIDKGWCYKRVCVPFGSRPEGVDGAWGPWTPWGDCSRTCGGGVSSSSRHCDSPRPTIGGKYCLGERRRHRSCNTDDCPPGSQDFREVQCSEFDSIPFRGKFYKWKTYRGGGVKACSLTCLAEGFNFYTERAAAVVDGTPCRPDTVDICVSGECKHVGCDRVLGSDLREDKCRVCGGDGSACETIEGVFSPASPGAGYEDVVWIPKGSVHIFIQDLNLSLSHLALKGDQESLLLEGLPGTPQPHRLPLAGTTFQLRQGPDQVQSLEALGPINASLIVMVLARTELPALRYRFNAPIARDSLPPYSWHYAPWTKCSAQCAGGSQVQAVECRNQLDSSAVAPHYCSAHSKLPKRQRACNTEPCPPDWVVGNWSLCSRSCDAGVRSRSVVCQRRVSAAEEKALDDSACPQPRPPVLEACHGPTCPPEWAALDWSECTPSCGPGLRHRVVLCKSADHRATLPPAHCSPAAKPPATMRCNLRRCPPARWVAGEWGECSAQCGVGQRQRSVRCTSHTGQASHECTEALRPPTTQQCEAKCDSPTPGDGPEECKDVNKVAYCPLVLKFQFCSRAYFRQMCCKTCHGH

SEQ ID NO: 95 - protein, 182 aa, Homo sapiens
MKGWGWLALLLGALLGTAWARRSQDLHCGACRALVDELEWEIAQVDPKKTIQMGSFRINPDGSQSVVEVPYARSEAHLTELLEEICDRMKEYGEQIDPSTHRKNYVRVVGRNGESSELDLQGIRIDSDISGTLKFACESIVEEYEDELIEFFSREADNVKDKLCSKRTDLCDHALHISHDEL

SEQ ID NO: 96 - protein, 144 aa, Homo sapiens
MLLAMVLTSALLLCSVAGQGCPTLAGILDINFLINKMQEDPASKCHCSANVTSCLCLGIPSDNCTRPCFSERLSQMTNTTMQTRYPLIFSRVKKSVEVLKNNKCPYFSCEQPCNQTTAGNALTFLKSLLEIFQKEKMRGMRGKI

SEQ ID NO: 97 - protein, 291 aa, Homo sapiens
MQRARPTLWAAALTLLVLLRGPPVARAGASSAGLGPVVRCEPCDARALAQCAPPPAVCAELVREPGCGCCLTCALSEGQPCGIYTERCGSGLRCQPSPDEARPLQALLDGRGLCVNASAVSRLRAYLLPAPPAPGNASESEEDRSAGSVESPSVSSTHRVSDPKFHPLHSKIIIIKKGHAKDSQRYKVDYESQSTDTQNFSSESKRETEYGPCRREMEDTLNHLKFLNVLSPRGVHIPNCDKKGFYKKKQCRPSKGRKRGFCWCVDKYGQPLPGYTTKGKEDVHCYSMQSK

SEQ ID NO: 98 - protein, 976 aa, Homo sapiens
MERRWPLGLGLVLLLCAPLPPGARAKEVTLMDTSKAQGELGWLLDPPKDGWSEQQQILNGTPLYMYQDCPMQGRRDTDHWLRSNWIYRGEEASRVHVELQFTVRDCKSFPGGAGPLGCKETFNLLYMESDQDVGIQLRRPLFQKVTTVAADQSFTIRDLVSGSVKLNVERCSLGRLTRRGLYLAFHNPGACVALVSVRVFYQRCPETLNGLAQFPDTLPGPAGLVEVAGTCLPHARASPRPSGAPRMHCSPDGEWLVPVGRCHCEPGYEEGGSGEACVACPSGSYRMDMDTPHCLTCPQQSTAESEGATICTCESGHYRAPGEGPQVACTGPPSAPRNLSFSASGTQLSLRWEPPADTGGRQDVRYSVRCSQCQGTAQDGGPCQPCGVGVHFSPGARGLTTPAVHVNGLEPYANYTFNVEAQNGVSGLGSSGHASTSVSISMGHAESLSGLSLRLVKKEPRQLELTWAGSRPRSPGANLTYELHVLNQDEERYQMVLEPRVLLTELQPDTTYIVRVRMLTPLGPGPFSPDHEFRTSPPVSRGLTGGEIVAVIFGLLLGAALLLGILVFRSRRAQRQRQQRQRDRATDVDREDKLWLKPYVDLQAYEDPAQGALDFTRELDPAWLMVDTVIGEGEFGEVYRGTLRLPSQDCKTVAIKTLKDTSPGGQWWNFLREATIMGQFSHPHILHLEGVVTKRKPIMIITEFMENGALDAFLREREDQLVPGQLVAMLQGIASGMNYLSNHNYVHRDLAARNILVNQNLCCKVSDFGLTRLLDDFDGTYETQGGKIPIRWTAPEAIAHRIFTTASDVWSFGIVMWEVLSFGDKPYGEMSNQEVMKSIEDGYRLPPPVDCPAPLYELMKNCWAYDRARRPHFQKLQAHLEQLLANPHSLRTIANFDPRMTLRLPSLSGSDGIPYRTVSEWLESIRMKRYILHFHSAGLDTMECVLELTAEDLTQMGITLPGHQKRILCSIQGFKD

SEQ ID NO: 99 - protein, 494 aa, Homo sapiens
MLTSKGQGFLHGGLCLWLCVFTPFFKGCVGCATEERLFHKLFSHYNQFIRPVENVSDPVTVHFEVAITQLANVDEVNQIMETNLWLRHIWNDYKLRWDPMEYDGIETLRVPADKIWKPDIVLYNNAVGDFQVEGKTKALLKYNGMITWTPPAIFKSSCPMDITFFPFDHQNCSLKFGSWTYDKAEIDLLIIGSKVDMNDFWENSEWEIIDASGYKHDIKYNCCEEIYTDITYSFYIRRLPMFYTINLIIPCLFISFLTVLVFYLPSDCGEKVTLCISVLLSLTVFLLVITETIPSTSLVVPLVGEYLLFTMIFVTLSIVVTVFVLNIHYRTPTTHTMPRWVKTVFLKLLPQVLLMRWPLDKTRGTGSDAVPRGLARRPAKGKLASHGEPRHLKECFHCHKSNELATSKRRLSHQPLQWVVENSEHSPEVEDVINSVQFIAENMKSHNETKEVEDDWKYVAMVVDRVFLWVFIIVCVFGTAGLFLQPLLGNTGKS

SEQ ID NO: 100 - protein, 215 aa, Homo sapiens
MYGKSSTRAVLLLLGIQLTALWPIAAVEIYTSRVLEAVNGTDARLKCTFSSFAPVGDALTVTWNFRPLDGGPEQFVFYYHIDPFQPMSGRFKDRVSWDGNPERYDASILLWKLQFDDNGTYTCQVKNPPDVDGVIGEIRLSVVHTVRFSEIHFLALAIGSACALMIIIVIVVVLFQHYRKKRWAERAHKVVEIKSKEEERLNQEKKVSVYLEDTD

SEQ ID NO: 101 - protein, 383 aa, Homo sapiens
MAGIPGLLFLLFFLLCAVGQVSPYSAPWKPTWPAYRLPVVLPQSTLNLAKPDFGAEAKLEVSSSCGPQCHKGTPLPTYEEAKQYLSYETLYANGSRTETQVGIYILSSSGDGAQHRDSGSSGKSRRKRQIYGYDSRFSIFGKDFLLNYPFSTSVKLSTGCTGTLVAEKHVLTAAHCIHDGKTYVKGTQKLRVGFLKPKFKDGGRGANDSTSAMPEQMKFQWIRVKRTHVPKGWIKGNANDIGMDYDYALLELKKPHKRKFMKIGVSPPAKQLPGGRIHFSGYDNDRPGNLVYRFCDVKDETYDLLYQQCDAQPGASGSGVYVRMWKRQQQKWERKIIGIFSGHQWVDMNGSPQDFNVAVRITPLKYAQICYWIKGNYLDCREG

SEQ ID NO: 102 - protein, 1036 aa, Homo sapiens
MYLVAGDRGLAGCGHLLVSLLGLLLLLARSGTRALVCLPCDESKCEEPRNCPGSIVQGVCGCCYTCASQRNESCGGTFGIYGTCDRGLRCVIRPPLNGDSLTEYEAGVCEDENWTDDQLLGFKPCNENLIAGCNIINGKCECNTIRTCSNPFEFPSQDMCLSALKRIEEEKPDCSKARCEVQFSPRCPEDSVLIEGYAPPGECCPLPSRCVCNPAGCLRKVCQPGNLNILVSKASGKPGECCDLYECKPVFGVDCRTVECPPVQQTACPPDSYETQVRLTADGCCTLPTRCECLSGLCGFPVCEVGSTPRIVSRGDGTPGKCCDVFECVNDTKPACVFNNVEYYDGDMFRMDNCRFCRCQGGVAICFTAQCGEINCERYYVPEGECCPVCEDPVYPFNNPAGCYANGLILAHGDRWREDDCTFCQCVNGERHCVATVCGQTCTNPVKVPGECCPVCEEPTIITVDPPACGELSNCTLTGKDCINGFKRDHNGCRTCQCINTEELCSERKQGCTLNCPFGFLTDAQNCEICECRPRPKKCRPIICDKYCPLGLLKNKHGCDICRCKKCPELSCSKICPLGFQQDSHGCLICKCREASASAGPPILSGTCLTVDGHHHKNEESWHDGCRECYCLNGREMCALITCPVPACGNPTIHPGQCCPSCADDFVVQKPELSTPSICHAPGGEYFVEGETWNIDSCTQCTCHSGRVLCETEVCPPLLCQNPSRTQDSCCPQCTDQPFRPSLSRNNSVPNYCKNDEGDIFLAAESWKPDVCTSCICIDSVISCFSESCPSVSCERPVLRKGQCCPYCIEDTIPKKVVCHFSGKAYADEERWDLDSCTHCYCLQGQTLCSTVSCPPLPCVEPINVEGSCCPMCPEMYVPEPTNIPIEKTNHRGEVDLEVPLWPTPSENDIVHLPRDMGHLQVDYRDNRLHPSEDSSLDSIASVVVPIIICLSIIIAFLFINQKKQWIPLLCWYRTPTKPSSLNNQLVSVDCKKGTRVQVDSSQRMLRIAEPDARFSGFYSMQKQNHLQADNFYQTV

SEQ ID NO: 103 - protein, 1216 aa, Homo sapiens
MGHLPTGIHGARRLLPLLWLFVLFKNATAFHVTVQDDNNIVVSLEASDVISPASVYVVKITGESKNYFFEFEEFNSTLPPPVIFKASYHGLYYIITLVVVNGNVVTKPSRSITVLTKPLPVTSVSIYDYKPSPETGVLFEIHYPEKYNVFTRVNISYWEGKDFRTMLYKDFFKGKTVFNHWLPGMCYSNITFQLVSEATFNKSTLVEYSGVSHEPKQHRTAPYPPQNISVRIVNLNKNNWEEQSGNFPEESFMRSQDTIGKEKLFHFTEETPEIPSGNISSGWPDFNSSDYETTSQPYWWDSASAAPESEDEFVSVLPMEYENNSTLSETEKSTSGSFSFFPVQMILTWLPPKPPTAFDGFHIHIEREENFTEYLMVDEEAHEFVAELKEPGKYKLSVTTFSSSGSCETRKSQSAKSLSFYISPSGEWIEELTEKPQHVSVHVLSSTTALMSWTSSQENYNSTIVSVVSLTCQKQKESQRLEKQYCTQVNSSKPIIENLVPGAQYQVVIYLRKGPLIGPPSDPVTFAIVPTGIKDLMLYPLGPTAVVLSWTRPYLGVFRKYVVEMFYFNPATMTSEWTTYYEIAATVSLTASVRIANLLPAWYYNFRVTMVTWGDPELSCCDSSTISFITAPVAPEITSVEYFNSLLYISWTYGDDTTDLSHSRMLHWMVVAEGKKKIKKSVTRNVMTAILSLPPGDIYNLSVTACTERGSNTSMLRLVKLEPAPPKSLFAVNKTQTSVTLLWVEEGVADFFEVFCQQVGSSQKTKLQEPVAVSSHVVTISSLLPATAYNCSVTSFSHDSPSVPTFIAVSTMVTEMNPNVVVISVLAILSTLLIGLLLVTLIILRKKHLQMARECGAGTFVNFASLERDGKLPYNWRRSIFAFLTLLPSCLWTDYLLAFYINPWSKNGLKKRKLTNPVQLDDFDAYIKDMAKDSDYKFSLQFEELKLIGLDIPHFAADLPLNRCKNRYTNILPYDFSRVRLVSMNEEEGADYINANYIPGYNSPQEYIATQGPLPETRNDFWKMVLQQKSQIIVMLTQCNEKRRVKCDHYWPFTEEPIAYGDITVEMISEEEQDDWACRHFRINYADEMQDVMHFNYTAWPDHGVPTANAAESILQFVHMVRQQATKSKGPMIIHCSAGVGRTGTFIALDRLLQHIRDHEFVDILGLVSEMRSYRMSMVQTEEQYIFIHQCVQLMWMKKKQQFCISDVIYENVSKS

SEQ ID NO: 104 - protein, 986 aa, Homo sapiens
MAGIFYFALFSCLFGICDAVTGSRVYPANEVTLLDSRSVQGELGWIASPLEGGWEEVSIMDEKNTPIRTYQVCNVMEPSQNNWLRTDWITREGAQRVYIEIKFTLRDCNSLPGVMGTCKETFNLYYYESDNDKERFIRENQFVKIDTIAADESFTQVDIGDRIMKLNTEIRDVGPLSKKGFYLAFQDVGACIALVSVRVFYKKCPLTVRNLAQFPDTITGADTSSLVEVRGSCVNNSEEKDVPKMYCGADGEWLVPIGNCLCNAGHEERSGECQACKIGYYKALSTDATCAKCPPHSYSVWEGATSCTCDRGFFRADNDAASMPCTRPPSAPLNLISNVNETSVNLEWSSPQNTGGRQDISYNVVCKKCGAGDPSKCRPCGSGVHYTPQQNGLKTTKVSITDLLAHTNYTFEIWAVNGVSKYNPNPDQSVSVTVTTNQAAPSSIALVQAKEVTRYSVALAWLEPDRPNGVILEYEVKYYEKDQNERSYRIVRTAARNTDIKGLNPLTSYVFHVRARTAAGYGDFSEPLEVTTNTVPSRIIGDGANSTVLLVSVSGSVVLVVILIAAFVISRRRSKYSKAKQEADEEKHLNQGVRTYVDPFTYEDPNQAVREFAKEIDASCIKIEKVIGVGEFGEVCSGRLKVPGKREICVAIKTLKAGYTDKQRRDFLSEASIMGQFDHPNIIHLEGVVTKCKPVMIITEYMENGSLDAFLRKNDGRFTVIQLVGMLRGIGSGMKYLSDMSYVHRDLAARNILVNSNLVCKVSDFGMSRVLEDDPEAAYTTRGGKIPIRWTAPEAIAYRKFTSASDVWSYGIVMWEVMSYGERPYWDMSNQDVIKAIEEGYRLPPPMDCPIALHQLMLDCWQKERSDRPKFGQIVNMLDKLIRNPNSLKRTGTESSRPNTALLDPSSPEFSAVVSVGDWLQAIKMDRYKDNFTAAGYTTLEAVVHVNQEDLARIGITAITHQNKILSSVQAMRTQMQQMHGRMVPV

SEQ ID NO: 105 - protein, 1338 aa, Homo sapiens
MVSYWDTGVLLCALLSCLLLTGSSSGSKLKDPELSLKGTQHIMQAGQTLHLQCRGEAAHKWSLPEMVSKESERLSITKSACGRNGKQFCSTLTLNTAQANHTGFYSCKYLAVPTSKKKETESAIYIFISDTGRPFVEMYSEIPEIIHMTEGRELVIPCRVTSPNITVTLKKFPLDTLIPDGKRIIWDSRKGFIISNATYKEIGLLTCEATVNGHLYKTNYLTHRQTNTIIDVQISTPRPVKLLRGHTLVLNCTATTPLNTRVQMTWSYPDEKNKRASVRRRIDQSNSHANIFYSVLTIDKMQNKDKGLYTCRVRSGPSFKSVNTSVHIYDKAFITVKHRKQQVLETVAGKRSYRLSMKVKAFPSPEVVWLKDGLPATEKSARYLTRGYSLIIKDVTEEDAGNYTILLSIKQSNVFKNLTATLIVNVKPQIYEKAVSSFPDPALYPLGSRQILTCTAYGIPQPTIKWFWHPCNHNHSEARCDFCSNNEESFILDADSNMGNRIESITQRMAIIEGKNKMASTLVVADSRISGIYICIASNKVGTVGRNISFYITDVPNGFHVNLEKMPTEGEDLKLSCTVNKFLYRDVTWILLRTVNNRTMHYSISKQKMAITKEHSITLNLTIMNVSLQDSGTYACRARNVYTGEEILQKKEITIRDQEAPYLLRNLSDHTVAISSSTTLDCHANGVPEPQITWFKNNHKIQQEPGIILGPGSSTLFIERVTEEDEGVYHCKATNQKGSVESSAYLTVQGTSDKSNLELITLTCTCVAATLFWLLLTLFIRKMKRSSSEIKTDYLSIIMDPDEVPLDEQCERLPYDASKWEFARERLKLGKSLGRGAFGKVVQASAFGIKKSPTCRTVAVKMLKEGATASEYKALMTELKILTHIGHHLNVVNLLGACTKQGGPLMVIVEYCKYGNLSNYLKSKRDLFFLNKDAALHMEPKKEKMEPGLEQGKKPRLDSVTSSESFASSGFQEDKSLSDVEEEEDSDGFYKEPITMEDLISYSFQVARGMEFLSSRKCIHRDLAARNILLSENNVVKICDFGLARDIYKNPDYVRKGDTRLPLKWMAPESIFDKIYSTKSDVWSYGVLLWEIFSLGGSPYPGVQMDEDFCSRLREGMRMRAPEYSTPEIYQIMLDCWHRDPKERPRFAELVEKLGDLLQANVQQDGKDYIPINAILTGNSGFTYSTPAFSEDFFKESISAPKFNSGSSDDVRYVNAFKFMSLERIKTFEELLPNATSMFDDYQGDSSTLLASPMLKRFTWTDSKPKASLKIDLRVTSKSKESGLSDVSRPSFCHSSCGHVSEGKRRFTYDHAELERKIACCSPPPDYNSVVLYSTPPI

SEQ ID NO: 106 - protein, 160 aa, Homo sapiens [sequence omitted]

SEQ ID NO: 107 - protein, 1009 aa, Homo sapiens
MGQLCWLPLLAPLLLLRPPGVQSAGPIRAFVVPHSHMDVGWVYTVQESMRAYAANVYTSVVEELARGQQRRFIAVEQEFFRLWWDGVASDQQKYQVRQLLEEGRLEFVIGGQVMHDEAVTHLDDQILQLTEGHGFLYETFGIRPQFSWHVDPFGASATTPTLFALAGFNAHLGSRIDYDLKAAMQEARGLQFVWRGSPSLSERQEIFTHIMDQYSYCTPSHIPFSNRSGFYWNGVAVFPKPPQDGVYPNMSEPVTPANINLYAEALVANVKQRAAWFRTPHVLWPWGCDKQFFNASVQFANMDPLLDHINSHAAELGVSVQYATLGDYFRALHALNVTWRVRDHHDFLPYSTEPFQAWTGFYTSRSSLKGLARRASALLYAGESMFTRYLWPAPRGHLDPTWALQQLQQLRWAVSEVQHHDAITGTESPKVRDMYATHLASGMLGMRKLMASIVLDELQPQAPMAASSDAGPAGHFASVYNPLAWTVTTIVTLTVGFPGVRVTDEAGHPVPSQIQNSTETPSAYDLLILTTIPGLSYRHYNIRPTAGAQEGTQEPAATVASTLQFGRRLRRRTSHAGRYLVPVANDCYIVLLDQDTNLMHSIWERQSNRTVRVTQEFLEYHVNGDVKQGPISDNYLFTPGKAAVPAWEAVEMEIVAGQLVTEIRQYFYRNMTAQNYTYAIRSRLTHVPQGHDGELLCHRIEQEYQAGPLELNREAVLRTSTNLNSQQVIYSDNNGYQMQRRPYVSYVNNSIARNYYPMVQSAFMEDGKSRLVLLSERAHGISSQGNGQVEVMLHRRLWNNFDWDLGYNLTLNDTSVVHPVLWLLLGSWSLTTALRQRSALALQHRPVVLFGDLAGTAPKLPGPQQQEAVTLPPNLHLQILSIPGWRYSSNHTEHSQNLRKGHRGEAQADLRRVLLRLYHLYEVGEDPVLSQPVTVNLEAVLQALGSVVAVEERSLTGTWDLSMLHRWSWRTGPGRHRGDTTSPSRPPGGPIITVHPKEIRTFFIHFQQQ

SEQ ID NO: 108 - protein, 1445 aa, Homo sapiens
MQGPPLLTAAHLLCVCTAALAVAPGPRFLVTAPGIIRPGGNVTIGVELLEHCPSQVTVKAELLKTASNLTVSVLEAEGVFEKGSFKTLTLPSLPLNSADEIYELRVTGRTQDEILFSNSTRLSFETKRISVFIQTDKALYKPKQEVKFRIVTLFSDFKPYKTSLNILIKDPKSNLIQQWLSQQSDLGVISKTFQLSSHPILGDWSIQVQVNDQTYYQSFQVSEYVLPKFEVTLQTPLYCSMNSKHLNGTITAKYTYGKPVKGDVTLTFLPLSFWGKKKNITKTFKINGSANFSFNDEEMKNVMDSSNGLSEYLDLSSPGPVEILTTVTESVTGISRNVSTNVFFKQHDYIIEFFDYTTVLKPSLNFTATVKVTRADGNQLTLEERRNNVVITVTQRNYTEYWSGSNSGNQKMEAVQKINYTVPQSGTFKIEFPILEDSSELQLKAYFLGSKSSMAVHSLFKSPSKTYIQLKTRDENIKVGSPFELVVSGNKRLKELSYMVVSRGQLVAVGKQNSTMFSLTPENSWTPKACVIVYYIEDDGEIISDVLKIPVQLVFKNKIKLYWSKVKAEPSEKVSLRISVTQPDSIVGIVAVDKSVNLMNASNDITMENVVHELELYNTGYYLGMFMNSFAVFQECGLWVLTDANLTKDYIDGVYDNAEYAERFMEENEGHIVDIHDFSLGSSPHVRKHFPETWIWLDTNMGYRIYQEFEVTVPDSITSWVATGFVISEDLGLGLTTTPVELQAFQPFFIFLNLPYSVIRGEEFALEITIFNYLKDATEVKVIIEKSDKFDILMTSNEINATGHQQTLLVPSEDGATVLFPIRPTHLGEIPITVTALSPTASDAVTQMILVKAEGIEKSYSQSILLDLTDNRLQSTLKTLSFSFPPNTVTGSERVQITAIGDVLGPSINGLASLIRMPYGCGEQNMINFAPNIYILDYLTKKKQLTDNLKEKALSFMRQGYQRELLYQREDGSFSAFGNYDPSGSTWLSAFVLRCFLEADPYIDIDQNVLHRTYTWLKGHQKSNGEFWDPGRVIHSELQGGNKSPVTLTAYIVTSLLGYRKYQPNIDVQESIHFLESEFSRGISDNYTLALITYALSSVGSPKAKEALNMLTWRAEQEGGMQFWVSSESKLSDSWQPRSLDIEVAAYALLSHFLQFQTSEGIPIMRWLSRQRNSLGGFASTQDTTVALKALSEFAALMNTERTNIQVTVTGPSSPSPVKFLIDTHNRLLLQTAELAVVQPTAVNISANGFGFAICQLNVVYNVKASGSSRRRRSIQNQEAFDLDVAVKENKDDLNHVDLNVCTSFSGPGRSGMALMEVNLLSGFMVPSEAISLSETVKKVEYDHGKLNLYLDSVNETQFCVNIPAVRNFKVSNTQDASVSIVDYYEPRRQAVRSYNSEVKLSSCDLCSDVQGCRPCEDGASGSHHHSSVIFIFCFKLLYFMELWL

SEQ ID NO: 109 - protein, 502 aa, Homo sapiens
MSLVLLSLAALCRSAVPREPTVQCGSETGPSPEWMLQHDLIPGDLRDLRVEPVTTSVATGDYSILMNVSWVLRADASIRLLKATKICVTGKSNFQSYSCVRCNYTEAFQTQTRPSGGKWTFSYIGFPVELNTVYFIGAHNIPNANMNEDGPSMSVNFTSPGCLDHIMKYKKKCVKAGSLWDPNITACKKNEETVEVNFTTTPLGNRYMALIQHSTIIGFSQVFEPHQKKQTRASVVIPVTGDSEGATVQLTPYFPTCGSDCIRHKGTVVLCPQTGVPFPLDNNKSKPGGWLPLLLLSLLVATWVLVAGIYLMWRHERIKKTSFSTTTLLPPIKVLVVYPSEICFHHTICYFTEFLQNHCRSEVILEKWQKKKIAEMGPVQWLATQKKAADKVVFLLSNDVNSVCDGTCGKSEGSPSENSQDLFPLAFNLFCSDLRSQIHLHKYVVVYFREIDTKDDYNALSVCPKYHLMKDATAFCAELLHVKQQVSAGKRSQACHDGCCSL

SEQ ID NO: 110 - protein, 513 aa, Homo sapiens
MKMASFLAFLLLNFRVCLLLLQLLMPHSAQFSVLGPSGPILAMVGEDADLPCHLFPTMSAETMELKWVSSSLRQVVNVYADGKEVEDRQSAPYRGRTSILRDGITAGKAALRIHNVTASDSGKYLCYFQDGDFYEKALVELKVAALGSDLHVDVKGYKDGGIHLECRSTGWYPQPQIQWSNNKGENIPTVEAPVVADGVGLYAVAASVIMRGSSGEGVSCTIRSSLLGLEKTASISIADPFFRSAQRWIAALAGTLPVLLLLLGGAGYFLWQQQEEKKTQFRKKKREQELREMAWSTMKQEQSTRVKLLEELRWRSIQYASRGERHSAYNEWKKALFKPADVILDPKTANPILLVSEDQRSVQRAKEPQDLPDNPERFNWHYCVLGCESFISGRHYWEVEVGDRKEWHIGVCSKNVQRKGWVKMTPENGFWTMGLTDGNKYRTLTEPRTNLKLPKPPKKVGVFLDYETGDISFYNAVDGSHIHTFLDVSFSEALYPVFRILTLEPTALTICPA

SEQ ID NO: 111 - protein, 337 aa, Homo sapiens
MRPTLLWSLLLLLGVFAAAAAAPPDPLSQLPAPQHPKIRLYNAEQVLSWEPVALSNSTRPVVYQVQFKYTDSKWFTADIMSIGVNCTQITATECDFTAASPSAGFPMDFNVTLRLRAELGALHSAWVTMPWFQHYRNVTVGPPENIEVTPGEGSLIIRFSSPFDIADTSTAFFCYYVHYWEKGGIQQVKGPFRSNSISLDNLKPSRVYCLQVQAQLLWNKSNIFRVGHLSNISCYETMADASTELQQVILISVGTFSLLSVLAGACFFLVLKYRGLIKYWFHTPPSIPLQIEEYLKDPTQPILEALDKDSSPKDDVWDSVSIISFPEKEQEDVLQTL

SEQ ID NO: 112 - protein, 473 aa, Homo sapiens
MRKLLTNLPAAAVLSAQVYSAVLQGLWEENVCGTPGRTRVCTALLYGQVCPFQDSTDGLRTITSILFNWPPENTSVYYQPPQRSSFRIKLAFRNLSWPGLGLEDHQEIVLGQLVLPEPNEAKPDDPAPRPGQHALTMPALEPAPPLLADLGPALEPESPAALGPPGYLHSAPGPAPAPGEGPPPGTVLEPQSAPESSCPCRGSVKNQPSEELPDMTTFPPRLLAEQLTLMDAELFKKVVLHECLGCIWGQGHLKGNEHMAPTVRATIAHFNRLTNCITTSCLGDHSMRARDRARVVEHWIKVARECLSLNNFSSVHVIVSALCSNPIGQLHKTWAGVSSKSMKELKELCKKDTAVKRDLLIKAGSFKVATQERNPQRVQMRLRRQKKGVVPFLGDFLTELQRLDSAIPDDLDGNTNKRSKEVRVLQEMQLLQVAAMNYRLRPLEKFVTYFTRMEQLSDKESYKLSCQLEPENP

SEQ ID NO: 113 - protein, 732 aa, Homo sapiens
MGQGWATAGLPSLLFLLLCYGHPLLVPSQEASQQVTVTHGTSSQATTSSQTTTHQATAHQTSAQSPNLVTDEAEASKFVEEYDRTSQVVWNEYAEANWNYNTNITTETSKILLQKNMQIANHTLKYGTQARKFDVNQLQNTTIKRIIKKVQDLERAALPAQELEEYNKILLDMETTYSVATVCHPNGSCLQLEPDLTNVMATSRKYEDLLWAWEGWRDKAGRAILQFYPKYVELINQAARLNGYVDAGDSWRSMYETPSLEQDLERLFQELQPLYLNLHAYVRRALHRHYGAQHINLEGPIPAHLLGNMWAQTWSNIYDLVVPFPSAPSMDTTEAMLKQGWTPRRMFKEADDFFTSLGLLPVPPEFWNKSMLEKPTDGREVVCHASAWDFYNGKDFRIKQCTTVNLEDLVVAHHEMGHIQYFMQYKDLPVALREGANPGFHEAIGDVLALSVSTPKHLHSLNLLSSEGGSDEHDINFLMKMALDKIAFIPFSYLVDQWRWRVFDGSITKENYNQEWWSLRLKYQGLCPPVPRTQGDFDPGAKFHIPSSVPYIRYFVSFIIQFQFHEALCQAAGHTGPLHKCDIYQSKEAGQRLATAMKLGFSRPWPEAMQLITGQPNMSASAMLSYFKPLLDWLRTENELHGEKLGWPQYNWTPNSARSEGPLPDSGRVSFLGLDLDAQQARVGQWLLLFLGIALLVATLGLSQRLFSIRHRSLHRHSHGPQFGSEVELRHS

SEQ ID NO: 114 - protein, 1306 aa, Homo sapiens
MGAASGRRGPGLLLPLPLLLLLPPQPALALDPGLQPGNFSADEAGAQLFAQSYNSSAEQVLFQSVAASWAHDTNITAENARRQEEAALLSQEFAEAWGQKAKELYEPIWQNFTDPQLRRIIGAVRTLGSANLPLAKRQQYNALLSNMSRIYSTAKVCLPNKTATCWSLDPDLTNILASSRSYAMLLFAWEGWHNAAGIPLKPLYEDFTALSNEAYKQDGFTDTGAYWRSWYNSPTFEDDLEHLYQQLEPLYLNLHAFVRRALHRRYGDRYINLRGPIPAHLLGDMWAQSWENIYDMVVPFPDKPNLDVTSTMLQQGWNATHMFRVAEEFFTSLELSPMPPEFWEGSMLEKPADGREVVCHASAWDFYNRKDFRIKQCTRVTMDQLSTVHHEMGHIQYYLQYKDLPVSLRRGANPGFHEAIGDVLALSVSTPEHLHKIGLLDRVTNDTESDINYLLKMALEKIAFLPFGYLVDQWRWGVFSGRTPPSRYNFDWWYLRTKYQGICPPVTRNETHFDAGAKFHVPNVTPYIRYFVSFVLQFQFHEALCKEAGYEGPLHQCDIYRSTKAGAKLRKVLQAGSSRPWQEVLKDMVGLDALDAQPLLKYFQPVTQWLQEQNQQNGEVLGWPEYQWHPPLPDNYPEGIDLVTDEAEASKFVEEYDRTSQVVWNEYAEANWNYNTNITTETSKILLQKNMQIANHTLKYGTQARKFDVNQLQNTTIKRIIKKVQDLERAALPAQELEEYNKILLDMETTYSVATVCHPNGSCLQLEPDLTNVMATSRKYEDLLWAWEGWRDKAGRAILQFYPKYVELINQAARLNGYVDAGDSWRSMYETPSLEQDLERLFQELQPLYLNLHAYVRRALHRHYGAQHINLEGPIPAHLLGNMWAQTWSNIYDLVVPFPSAPSMDTTEAMLKQGWTPRRMFKEADDFFTSLGLLPVPPEFWNKSMLEKPTDGREVVCHASAWDFYNGKDFRIKQCTTVNLEDLVVAHHEMGHIQYFMQYKDLPVALREGANPGFHEAIGDVLALSVSTPKHLHSLNLLSSEGGSDEHDINFLMKMALDKIAFIPFSYLVDQWRWRVFDGSITKENYNQEWWSLRLKYQGLCPPVPRTQGDFDPGAKFHIPSSVPYIRYFVSFIIQFQFHEALCQAAGHTGPLHKCDIYQSKEAGQRLATAMKLGFSRPWPEAMQLITGQPNMSASAMLSYFKPLLDWLRTENELHGEKLGWPQYNWTPNSARSEGPLPDSGRVSFLGLDLDAQQARVGQWLLLFLGIALLVATLGLSQRLFSIRHRSLHRHSHGPQFGSEVELRHS

SEQ ID NO: 115 - protein, 331 aa, Homo sapiens
MENPSPAAALGKALCALLLATLGAAGQPLGGESICSARALAKYSITFTGKWSQTAFPKQYPLFRPPAQWSSLLGAAHSSDYSMWRKNQYVSNGLRDFAERGEAWALMKEIEAAGEALQSVHAVFSAPAVPSGTGQTSAELEVQRRHSLVSFVVRIVPSPDWFVGVDSLDLCDGDRWREQAALDLYPYDAGTDSGFTFSSPNFATIPQDTVTEITSSSPSHPANSFYYPRLKALPPIARVTLVRLRQSPRAFIPPAPVLPSRDNEIVDSASVPETPLDCEVSLWSSWGLCGGHCGRLGTKSRTRYVRVQPANNGSPCPELEEEAECVPDNCV

SEQ ID NO: 116 - protein, 257 aa, Homo sapiens
MGTVRPPRPSLLLVSTRESCLFLLFCLHLGAACPQPCRCPDHAGAVAVFCSLRGLQEVPEDIPANTVLLKLDANKISHLPDGAFQHLHRLRELDLSHNAIEAIGSATFAGLAGGLRLLDLSYNRIQRIPKDALGKLSAKIRLSHNPLHCECALQEALWELKLDPDSVDEIACHTSVQEEFVGKPLVQALDAGASLCSVPHRTTDVAMLVTMFGWFAMVIAYVVYYVRHNQEDARRHLEYLKSLPSAPASKDPIGPGP

SEQ ID NO: 117 - protein, 304 aa, Homo sapiens
MSSTLPALLCVGLCLSQRISAQQQTLPKPFIWAEPHFMVPKEKQVTICCQGNYGAVEYQLHFEGSLFAVDRPKPPERINKVQFYIPDMNSRMAGQYSCIYRVGELWSEPSNLLDLVVTEMYDTPTLSVHPGPEVISGEKVTFYCRLDTATSMFLLLKEGRSSHVQRGYGKVQAEFPLGPVTTAHRGTYRCFGSYNNHAWSFPSEPVKLLVTGDIENTSLAPEDPTFPADTWGTYLLTTETGLQKDHALWDHTAQNLLRMGLAFLVLVALVWFLVEDWLSRKRTRERASRASTWEGRRRLNTQTL

SEQ ID NO: 118 - protein, 1615 aa, Homo sapiens
MEAAPPGPPWPLLLLLLLLLALCGCPAPAAASPLLLFANRRDVRLVDAGGVKLESTIVVSGLEDAAAVDFQFSKGAVYWTDVSEEAIKQTYLNQTGAAVQNVVISGLVSPDGLACDWVGKKLYWTDSETNRIEVANLNGTSRKVLFWQDLDQPRAIALDPAHGYMYWTDWGETPRIERAGMDGSTRKIIVDSDIYWPNGLTIDLEEQKLYWADAKLSFIHRANLDGSFRQKVVEGSLTHPFALTLSGDTLYWTDWQTRSIHACNKRTGGKRKEILSALYSPMDIQVLSQERQPFFHTRCEEDNGGCSHLCLLSPSEPFYTCACPTGVQLQDNGRTCKAGAEEVLLLARRTDLRRISLDTPDFTDIVLQVDDIRHAIAIDYDPLEGYVYWTDDEVRAIRRAYLDGSGAQTLVNTEINDPDGIAVDWVARNLYWTDTGTDRIEVTRLNGTSRKILVSEDLDEPRAIALHPVMGLMYWTDWGENPKIECANLDGQERRVLVNASLGWPNGLALDLQEGKLYWGDAKTDKIEVINVDGTKRRTLLEDKLPHIFGFTLLGDFIYWTDWQRRSIERVHKVKASRDVIIDQLPDLMGLKAVNVAKVVGTNPCADRNGGCSHLCFFTPHATRCGCPIGLELLSDMKTCIVPEAFLVFTSRAAIHRISLETNNNDVAIPLTGVKEASALDFDVSNNHIYWTDVSLKTISRAFMNGSSVEHVVEFGLDYPEGMAVDWMGKNLYWADTGTNRIEVARLDGQFRQVLVWRDLDNPRSLALDPTKGYIYWTEWGGKPRIVRAFMDGTNCMTLVDKVGRANDLTIDYADQRLYWTDLDTNMIESSNMLGQERVVIADDLPHPFGLTQYSDYIYWTDWNLHSIERADKTSGRNRTLIQGHLDFVMDILVFHSSRQDGLNDCMHNNGQCGQLCLAIPGGHRCGCASHYTLDPSSRNCSPPTTFLLFSQKSAISRMIPDDQHSPDLILPLHGLRNVKAIDYDPLDKFIYWVDGRQNIKRAKDDGTQPFVLTSLSQGQNPDRQPHDLSIDIYSRTLFWTCEATNTINVHRLSGEAMGVVLRGDRDKPRAIVVNAERGYLYFTNMQDRAAKIERAALDGTEREVLFTTGLIRPVALVVDNTLGKLFWVDADLKRIESCDLSGANRLTLEDANIVQPLGLTILGKHLYWIDRQQQMIERVEKTTGDKRTRIQGRVAHLTGIHAVEEVSLEEFSAHPCARDNGGCSHICIAKGDGTPRCSCPVHLVLLQNLLTCGEPPTCSPDQFACATGEIDCIPGAWRCDGFPECDDQSDEEGCPVCSAAQFPCARGQCVDLRLRCDGEADCQDRSDEADCDAICLPNQFRCASGQCVLIKQQCDSFPDCIDGSDELMCEITKPPSDDSPAHSSAIGPVIGIILSLFVMGGVYFVCQRVVCQRYAGANGPFPHEYVSGTPHVPLNFIAPGGSQHGPFTGIACGKSMMSSVSLMGGRGGVPLYDRNHVTGASSSSSSSTKATLYPPILNPPPSPATDPSLYNMDMFYSSNIPATARPYRPYIIRGMAPPTTPCSTDVCDSDYSASRWKASKYYLDLNSDSDPYPPPPTPHSQYLSAEDSCPPSPATERSYFHLFPPPPSPCTDSS

SEQ ID NO: 119 - protein, 1229 aa, Homo sapiens
MGASRDRGLAALWCLGLLGGLARVAGTHYRYLWRGCYPCHLGQAGYPVSAGDQRPDVDECRTHNGGCQHRCVNTPGSYLCECKPGFRLHTDSRTCLAINSCALGNGGCQHHCVQLTITRHRCQCRPGFQLQEDGRHCVRRSPCANRNGSCMHRCQVVRGLARCECHVGYQLAADGKACEDVDECAAGLAQCAHGCLNTQGSFKCVCHAGYELGADGRQCYRIEMEIVNSCEANNGGCSHGCSHTSAGPLCTCPRGYELDTDQRTCIDVDDCADSPCCQQVCTNNPGGYECGCYAGYRLSADGCGCEDVDECASSRGGCEHHCTNLAGSFQCSCEAGYRLHEDRRGCSPLEEPMVDLDGELPFVRPLPHIAVLQDELPQLFQDDDVGADEEEAELRGEHTLTEKFVCLDDSFGHDCSLTCDDCRNGGTCLLGLDGCDCPEGWTGLICNETCPPDTFGKNCSFSCSCQNGGTCDSVTGACRCPPGVSGTNCEDGCPKGYYGKHCRKKCNCANRGRCHRLYGACLCDPGLYGRFCHLTCPPWAFGPGCSEECQCVQPHTQSCDKRDGSCSCKAGFRGERCQAECELGYFGPGCWQACTCPVGVACDSVSGECGKRCPAGFQGEDCGQECPVGTFGVNCSSSCSCGGAPCHGVTGQCRCPPGRTGEDCEADCPEGRWGLGCQEICPACQHAARCDPETGACLCLPGFVGSRCQDVCPAGWYGPSCQTRCSCANDGHCHPATGHCSCAPGWTGFSCQRACDTGHWGPDCSHPCNCSAGHGSCDAISGLCLCEAGYVGPRCEQQCPQGHFGPGCEQRCQCQHGAACDHVSGACTCPAGWRGTFCEHACPAGFFGLDCRSACNCTAGAACDAVNGSCLCPAGRRGPRCAEKCLPRDVRAGCRHSGGCLNGGLCDPHTGRCLCPAGWTGDKCQSPCLRGWFGEACAQRCSCPPGAACHHVTGACRCPPGFTGSGCEQGCPPGRYGPGCEQLCGCLNGGSCDAATGACRCPTGFLGTDCNLTCPQGRFGPNCTHVCGCGQGAACDPVTGTCLCPPGRAGVRCERGCPQNRFGVGCEHTCSCRNGGLCHASNGSCSCGLGWTGRHCELACPPGRYGAACHLECSCHNNSTCEPATGTCRCGPGFYGQACEHRRSGATCNLDCRRGQFGPSCTLHCDCGGGADCDPVSGQCHCVDGYMGPTCREGGPLRLPENPSLAQGSAGTLPASSRPTSRSGGPARH

SEQ ID NO: 120 - protein, 739 aa, Homo sapiens
MPGKMVVILGASNILWIMFAASQAFKIETTPESRYLAQIGDSVSLTCSTTGCESPFFSWRTQIDSPLNGKVTNEGTTSTLTMNPVSFGNEHSYLCTATCESRKLEKGIQVEIYSFPKDPEIHLSGPLEAGKPITVKCSVADVYPFDRLEIDLLKGDHLMKSQEFLEDADRKSLETKSLEVTFTPVIEDIGKVLVCRAKLHIDEMDSVPTVRQAVKELQVYISPKNTVISVNPSTKLQEGGSVTMTCSSEGLPAPEIFWSKKLDNGNLQHLSGNATLTLIAMRMEDSGIYVCEGVNLIGKNRKEVELIVQEKPFTVEISPGPRIAAQIGDSVMLTCSVMGCESPSFSWRTQIDSPLSGKVRSEGTNSTLTLSPVSFENEHSYLCTVTCGHKKLEKGIQVELYSFPRDPEIEMSGGLVNGSSVTVSCKVPSVYPLDRLEIELLKGETILENIEFLEDTDMKSLENKSLEMTFIPTIEDTGKALVCQAKLHIDDMEFEPKQRQSTQTLYVNVAPRDTTVLVSPSSILEEGSSVNMTCLSQGFPAPKILWSRQLPNGELQPLSENATLTLISTKMEDSGVYLCEGINQAGRSRKEVELIIQVTPKDIKLTAFPSESVKEGDTVIISCTCGNVPETWIILKKKAETGDTVLKSIDGAYTIRKAQLKDAGVYECESKNKVGSQLRSLTLDVQGRENNKDYFSPELLVLYFASSLIIPAIGMIIYFARKANMKGSYSLVEAQKSKV

SEQ ID NO: 121 - protein, 1184 aa, Homo sapiens
MVLLWEPAGAWLALGLALALGPSVAAAAPRQDCTGVECPPLENCIEEALEPGACCATCVQQGCACEGYQYYDCLQGGFVRGRVPAGQSYFVDFGSTECSCPPGGGKISCQFMLCPELPPNCIEAVVVADSCPQCGQVGCVHAGHKYAAGHTVHLPPCRACHCPDAGGELICYQLPGCHGNFSDAEEGDPERHYEDPYSYDQEVAEVEAATALGGEVQAGAVQAGAGGPPAALGGGSQPLSTIQAPPWPAVLPRPTAAAALGPPAPVQAKARRVTEDSEEEEEEEEEREEMAVTEQLAAGGHRGLDGLPTTAPAGPSLPIQEERAEAGARAEAGARPEENLILDAQATSRSTGPEGVTHAPSLGKAALVPTQAVPGSPRDPVKPSPHNILSTSLPDAAWIPPTREVPRKPQVLPHSHVEEDTDPNSVHSIPRSSPEGSTKDLIETCCAAGQQWAIDNDECLEIPESGTEDNVCRTAQRHCCVSYLQEKSCMAGVLGAKEGETCGAEDNDSCGISLYKQCCDCCGLGLRVRAEGQSCESNPNLGYPCNHVMLSCCEGEEPLIVPEVRRPPEPAAAPRRVSEAEMAGREALSLGTEAELPNSLPGDDQDECLLLPGELCQHLCINTVGSYHCACFPGFSLQDDGRTCRPEGHPPQPEAPQEPALKSEFSQVASNTIPLPLPQPNTCKDNGPCKQVCSTVGGSAICSCFPGYAIMADGVSCEDINECVTDLHTCSRGEHCVNTLGSFHCYKALTCEPGYALKDGECEDVDECAMGTHTCQPGFLCQNTKGSFYCQARQRCMDGFLQDPEGNCVDINECTSLSEPCRPGFSCINTVGSYTCQRNPLICARGYHASDDGTKCVDVNECETGVHRCGEGQVCHNLPGSYRCDCKAGFQRDAFGRGCIDVNECWASPGRLCQHTCENTLGSYRCSCASGFLLAADGKRCEDVNECEAQRCSQECANIYGSYQCYCRQGYQLAEDGHTCTDIDECAQGAGILCTFRCLNVPGSYQCACPEQGYTMTANGRSCKDVDECALGTHNCSEAETCHNIQGSFRCLRFECPPNYVQVSKTKCERTTCHDFLECQNSPARITHYQLNFQTGLLVPAHIFRIGPAPAFTGDTIALNIIKGNEEGYFGTRRLNAYTGVVYLQRAVLEPRDFALDVEMKLWRQGSVTTFLAKMHIFFTTFAL

SEQ ID NO: 122 - protein, 410 aa, Homo sapiens
MAFLGLFSLLVLQSMATGATFPEEAIADLSVNMYNRLRATGEDENILFSPLSIALAMGMMELGAQGSTQKEIRHSMGYDSLKNGEEFSFLKEFSNMVTAKESQYVMKIANSLFVQNGFHVNEEFLQMMKKYFNAAVNHVDFSQNVAVANYINKWVENNTNNLVKDLVSPRDFDAATYLALINAVYFKGNWKSQFRPENTRTFSFTKDDESEVQIPMMYQQGEFYYGEFSDGSNEAGGIYQVLEIPYEGDEISMMLVLSRQEVPLATLEPLVKAQLVEEWANSVKKQKVEVYLPRFTVEQEIDLKDVLKALGITEIFIKDANLTGLSDNKEIFLSKAIHKSFLEVNEEGSEAAAVSGMIAISRMAVLYPQVIVDHPFFFLIRNRRTGTILFMGRVMHPETMNTSGHDFEEL

SEQ ID NO: 123 - protein, 417 aa, Homo sapiens
MRLILPVGLIATTLAIAPVRFDREKVFRVKPQDEKQADIIKDLAKTNELDFWYPGATHHVAANMMVDFRVSEKESQAIQSALDQNKMHYEILIHDLQEEIEKQFDVKEDIPGRHSYAKYNNWEKIVAWTEKMMDKYPEMVSRIKIGSTVEDNPLYVLKIGEKNERRKAIFTDCGIHAREWVSPAFCQWFVYQATKTYGRNKIMTKLLDRMNFYILPVFNVDGYIWSWTKNRMWRKNRSKNQNSKCIGTDLNRNFNASWNSIPNTNDPCADNYRGSAPESEKETKAVTNFIRSHLNEIKVYITFHSYSQMLLFPYGYTSKLPPNHEDLAKVAKIGTDVLSTRYETRYIYGPIESTIYPISGSSLDWAYDLGIKHTFAFELRDKGKFGFLLPESRIKPTCRETMLAVKFIAKYILKHTS

SEQ ID NO: 124 - protein, 836 aa, Homo sapiens
MAGLNCGVSIALLGVLLLGAARLPRGAEAFEIALPRESNITVLIKLGTPTLLAKPCYIVISKRHITMLSIKSGERIVFTFSCQSPENHFVIEIQKNIDCMSGPCPFGEVQLQPSTSLLPTLNRTFIWDVKAHKSIGLELQFSIPRLRQIGPGESCPDGVTHSISGRIDATVVRIGTFCSNGTVSRIKMQEGVKMALHLPWFHPRNVSGFSIANRSSIKRLCIIESVFEGEGSATLMSANYPEGFPEDELMTWQFVVPAHLRASVSFLNFNLSNCERKEERVEYYIPGSTTNPEVFKLEDKQPGNMAGNFNLSLQGCDQDAQSPGILRLQFQVLVQHPQNESNKIYVVDLSNERAMSLTIEPRPVKQSRKFVPGCFVCLESRTCSSNLTLTSGSKHKISFLCDDLTRLWMNVEKTISCTDHRYCQRKSYSLQVPSDILHLPVELHDFSWKLLVPKDRLSLVLVPAQKLQQHTHEKPCNTSFSYLVASAIPSQDLYFGSFCPGGSIKQIQVKQNISVTLRTFAPSFQQEASRQGLTVSFIPYFKEEGVFTVTPDTKSKVYLRTPNWDRGLPSLTSVSWNISVPRDQVACLTFFKERSGVVCQTGRAFMIIQEQRTRAEEIFSLDEDVLPKPSFHHHSFWVNISNCSPTSGKQLDLLFSVTLTPRTVDLTVILIAAVGGGVLLLSALGLIICCVKKKKKKTNKGPAVGIYNDNINTEMPRQPKKFQKGRKDNDSHVYAVIEDTMVYGHLLQDSSGSFLQPEVDTYRPFQGTMGVCPPSPPTICSRAPTAKLATEEPPPRSPPESESEPYTFSHPNNGDVSSKDTDIPLLNTQEPMEPAE

SEQ ID NO: 125 - protein, 1181 aa, Homo sapiens
MGPERTGAAPLPLLLVLALSQGILNCCLAYNVGLPEAKIFSGPSSEQFGYAVQQFINPKGNWLLVGSPWSGFPENRMGDVYKCPVDLSTATCEKLNLQTSTSIPNVTEMKTNMSLGLILTRNMGTGGFLTCGPLWAQQCGNQYYTTGVCSDISPDFQLSASFSPATQPCPSLIDVVVVCDESNSIYPWDAVKNFLEKFVQGLDIGPTKTQVGLIQYANNPRVVFNLNTYKTKEEMIVATSQTSQYGGDLTNTFGAIQYARKYAYSAASGGRRSATKVMVVVTDGESHDGSMLKAVIDQCNHDNILRFGIAVLGYLNRNALDTKNLIKEIKAIASIPTERYFFNVSDEAALLEKAGTLGEQIFSIEGTVQGGDNFQMEMSQVGFSADYSSQNDILMLGAVGAFGWSGTIVQKTSHGHLIFPKQAFDQILQDRNHSSYLGYSVAAISTGESTHFVAGAPRANYTGQIVLYSVNENGNITVIQAHRGDQIGSYFGSVLCSVDVDKDTITDVLLVGAPMYMSDLKKEEGRVYLFTIKEGILGQHQFLEGPEGIENTRFGSAIAALSDINMDGFNDVIVGSPLENQNSGAVYIYNGHQGTIRTKYSQKILGSDGAFRSHLQYFGRSLDGYGDLNGDSITDVSIGAFGQVVQLWSQSIADVAIEASFTPEKITLVNKNAQIILKLCFSAKFRPTKQNNQVAIVYNITLDADGFSSRVTSRGLFKENNERCLQKNMVVNQAQSCPEHIIYIQEPSDVVNSLDLRVDISLENPGTSPALEAYSETAKVFSIPFHKDCGEDGLCISDLVLDVRQIPAAQEQPFIVSNQNKRLTFSVTLKNKRESAYNTGIVVDFSENLFFASFSLPVDGTEVTCQVAASQKSVACDVGYPALKREQQVTFTINFDFNLQNLQNQASLSFQALSESQEENKADNLVNLKIPLLYDAEIHLTRSTNINFYEISSDGNVPSIVHSFEDVGPKFIFSLKVTTGSVPVSMATVIIHIPQYTKEKNPLMYLTGVQTDKAGDISCNADINPLKIGQTSSSVSFKSENFRHTKELNCRTASCSNVTCWLKDVHMKGEYFVNVTTRIWNGTFASSTFQTVQLTAAAEINTYNPEIYVIEDNTVTIPLMIMKPDEKAEVPTGVIIGSIIAGILLLLALVAILWKLGFFKRKYEKMTKNPDEIDETTELSS

SEQ ID NO: 126 - protein, 904 aa, Homo sapiens
MRQTLPCIYFWGGLLPFGMLCASSTTKCTVSHEVADCSHLKLTQVPDDLPTNITVLNLTHNQLRRLPAANFTRYSQLTSLDVGFNTISKLEPELCQKLPMLKVLNLQHNELSQLSDKTFAFCTNLTELHLMSNSIQKIKNNPFVKQKNLITLDLSHNGLSSTKLGTQVQLENLQELLLSNNKIQALKSEELDIFANSSLKKLELSSNQIKEFSPGCFHAIGRLFGLFLNNVQLGPSLTEKLCLELANTSIRNLSLSNSQLSTTSNTTFLGLKWTNLTMLDLSYNNLNVVGNDSFAWLPQLEYFFLEYNNIQHLFSHSLHGLFNVRYLNLKRSFTKQSISLASLPKIDDFSFQWLKCLEHLNMEDNDIPGIKSNMFTGLINLKYLSLSNSFTSLRTLTNETFVSLAHSPLHILNLTKNKISKIESDAFSWLGHLEVLDLGLNEIGQELTGQEWRGLENIFEIYLSYNKYLQLTRNSFALVPSLQRLMLRRVALKNVDSSPSPFQPLRNLTILDLSNNNIANINDDMLEGLEKLEILDLQHNNLARLWKHANPGGPIYFLKGLSHLHILNLESNGFDEIPVEVFKDLFELKIIDLGLNNLNTLPASVFNNQVSLKSLNLQKNLITSVEKKVFGPAFRNLTELDMRFNPFDCTCESIAWFVNWINETHTNIPELSSHYLCNTPPHYHGFPVRLFDTSSCKDSAPFELFFMINTSILLIFIFIVLLIHFEGWRISFYWNVSVHRVLGFKEIDRQTEQFEYAAYIIHAYKDKDWVWEHFSSMEKEDQSLKFCLEERDFEAGVFELEAIVNSIKRSRKIIFVITHHLLKDPLCKRFKVHHAVQQAIEQNLDSIILVFLEEIPDYKLNHALCLRRGMFKSHCILNWPVQKERIGAFRHKLQVALGSKNSVH

SEQ ID NO: 127 - protein, 152 aa, Homo sapiens
MSRLPVLLLLQLLVRPGLQAPMTQTTPLKTSWVNCSNMIDEIITHLKQPPLPLLDFNNLNGEDQDILMENNLRRPNLEAFNRAVKSLQNASAIESILKNLLPCLPLATAAPTRHPIHIKDGDWNEFRRKLTFYLKTLENAQAQQTTLSLAIF

SEQ ID NO: 128 - protein, 144 aa, Homo sapiens
MWLQSLLLLGTVACSISAPARSPSPSTQPWEHVNAIQEARRLLNLSRDTAAEMNETVEVISEMFDLQEPTCLQTRLELYKQGLRGSLTKLKGPLTMMASHYKQHCPPTPETSCATQIITFESFKENLKDFLLVIPFDCWEPVQE

SEQ ID NO: 129 - protein, 272 aa, Homo sapiens
MAAKVFESIGKFGLALAVAGGVVNSALYNVDAGHRAVIFDRFRGVQDIVVGEGTHFLIPWVQKPIIFDCRSRPRNVPVITGSKDLQNVNITLRILFRPVASQLPRIFTSIGEDYDERVLPSITTEILKSVVARFDAGELITQRELVSRQVSDDLTERAATFGLILDDVSLTHLTFGKEFTEAVEAKQVAQQEAERARFVVEKAEQQKKAAIISAEGDSKAAELIANSLATAGDGLIELRKLEAAEDIAYQLSRSRNITYLPAGQSVLLQLPQ

SEQ ID NO: 130 - protein, 1019 aa, Homo sapiens
MLQGTCSVLLLWGILGAIQAQQQEVISPDTTERNNNCPEKTDCPIHVYFVLDTSESVTMQSPTDILLFHMKQFVPQFISQLQNEFYLDQVALSWRYGGLHFSDQVEVFSPPGSDRASFIKNLQGISSFRRGTFTDCALANMTEQIRQDRSKGTVHFAVVITDGHVTGSPCGGIKLQAERAREEGIRLFAVAPNQNLKEQGLRDIASTPHELYRNDYATMLPDSTEIDQDTINRIIKVMKHEAYGECYKVSCLEIPGPSGPKGYRGQKGAKGNMGEPGEPGQKGRQGDPGIEGPIGFPGPKGVPGFKGEKGEFGADGRKGAPGLAGKNGTDGQKGKLGRIGPPGCKGDPGNRGPDGYPGEAGSPGERGDQGGKGDPGRPGRRGPPGEIGAKGSKGYQGNSGAPGSPGVKGAKGGPGPRGPKGEPGRRGDPGTKGSPGSDGPKGEKGDPGPEGPRGLAGEVGNKGAKGDRGLPGPRGPQGALGEPGKQGSRGDPGDAGPRGDSGQPGPKGDPGRPGFSYPGPRGAPGEKGEPGPRGPEGGRGDFGLKGEPGRKGEKGEPADPGPPGEPGPRGPRGVPGPEGEPGPPGDPGLTECDVMTYVRETCGCCDCEKRCGALDVVFVIDSSESIGYTNFTLEKNFVINVVNRLGAIAKDPKSETGTRVGVVQYSHEGTFEAIQLDDERIDSLSSFKEAVKNLEWIAGGTWTPSALKFAYDRLIKESRRQKTRVFAVVITDGRHDPRDDDLNLRALCDRDVTVTAIGIGDMFHEKHESENLYSIACDKPQQVRNMTLFSDLVAEKFIDDMEDVLCPDPQIVCPDLPCQTELSVAQCTQRPVDIVFLLDGSERLGEQNFHKARRFVEQVARRLTLARRDDDPLNARVALLQFGGPGEQQVAFPLSHNLTAIHEALETTQYLNSFSHVGAGVVHAINAIVRSPRGGARRHAELSFVFLTDGVTGNDSLHESAHSMRKQNVVPTVLALGSDVDMDVLTTLSLGDRAAVFHEKDYDSLAQPGFFDRFIRWIC

SEQ ID NO: 131 - protein, 270 aa, Homo sapiens
MSPHPTALLGLVLCLAQTIHTQEEDLPRPSISAEPGTVIPLGSHVTFVCRGPVGVQTFRLERDSRSTYNDTEDVSQASPSESEARFRIDSVREGNAGLYRCIYYKPPKWSEQSDYLELLVKGPTQRPSDNSHNEHAPASQGLKAEHLYILIGVSVVFLFCLLLLVLFCLHRQNQIKQGPPRSKDEEQKPQQRPDLAVDVLERTADKATVNGLPEKDRETDTSALAAGSSQEVTYAQLDHWALTQRTARAVSPQSTKPMAESITYAAVARH

SEQ ID NO: 132 - protein, 252 aa, Homo sapiens
MAQLCGLRRSRAFLALLGSLLLSGVLAADRERSIHDFCLVSKVVGRCRASMPRWWYNVTDGSCQLFVYGGCDGNSNNYLTKEECLKKCATVTENATGDLATSRNAADSSVPSAPRRQDSEDHSSDMFNYEEYCTANAVTGPCRASFPRWYFDVERNSCNNFIYGGCRGNKNSYRSEEACMLRCFRQQENPPLPLGSKVVVLAGLFVMVLILFLGASMVYLIRVARRNQERALRTVWSSGDDKEQLVKNTYVL

SEQ ID NO: 133 - protein, 282 aa, Homo sapiens
MGSPGMVLGLLVQIWALQEASSLSVQQGPNLLQVRQGSQATLVCQVDQATAWERLRVKWTKDGAILCQPYITNGSLSLGVCGPQGRLSWQAPSHLTLQLDPVSLNHSGAYVCWAAVEIPELEEAEGNITRLFVDPDDPTQNRNRIASFPGFLFVLLGVGSMGVAAIVWGAWFWGRRSCQQRDSGNSPGNAFYSNVLYRPRGAPKKSEDCSGEGKDQRGQSIYSTSFPQPAPRQPHLASRPCPSPRPCPSPRPGHPVSMVRVSPRPSPTQQPRPKGFPKVGEE

SEQ ID NO: 134 - protein, 838 aa, Homo sapiens
MYAFYSLLIYIFYSLFRRDGGAAAAAEPGDPAQRARKPRGRRRPDLPAPELWTELTGLAASSEPEDGSEGAAEGRAAAVSLEEALLRLAEFLSVQLGAEESCGGPADLGQSGEVPSLLTVTSQLLALLAWLRSPRGRQALLQGTQPAPRVRPPSPDGSTSQEESPSHFTAVPGEPLGDETQGQQPLQLEEDQRAWQRLEQLILGQLEELKQQLEQQEEELGRLRLGVGATDSEKRVQHLTLENEALKQSLSLMRDLLLHWGPGPPIRAPQEEAEALLELQGRLQEAQDTTEALRAQLGVQEVQLQGLQGALQQLQQETEQNCRRELQQMHGQLAGLRARMASLRQGCGDLRGLVSTFTQSCQGSLSEARGQVSWALGALSSGGPGTQLPEGQQGPPAGCPGRLPELKGNIRVLCRLRPGTSSSLVSVEPGPGGTVTTCYRGRHRRFRLDWVFPPDASQEEVFRELEPAVLSCLRGYSVCIFTYGQTGTGKTYSMEGPPEDPGIVPRALQSLFREMGAGRQHRVTLSMVEIYNEAVRDLLAPGPPERLAVRQGPEGQGGIQVAGLTHWDVPNLETLHQMLKLGRSNRATAATAMNQRSSRSHALVTLTLRAASPPRAPGTAGTLHLVDLAGSERARKAGAAGPPRGDPDGARRLREAQTINRSLLALGGVMAALRAHRPHVPFRDSQLTRLLQPALGPGTTAVLLLQVGAGAGQVCACRSPPTRARPPAPLARRSPRGRRISGRQSAPSSSPTEWVKWSWGQPGAAGSRAPPGRLLPSAPTLRSPGPPAPLRRPLAVLHAPVPTTARARLSRPQRACPSSPGSRPCPWGLRPGLCWQRR

SEQ ID NO: 135 - protein, 150 aa, Homo sapiens
MVLCFPLLLLLLVLWGPVCPLHAWPKRLTKAHWFEIQHIQPSPLQCNRAMSGINNYTQHCKHQNTFLHDSFQNVAAVCDLLSIVCKNRRHNCHQSSKPVNMTDCRLTSGKYPQCRYSAAAQYKFFIVACDPPQKSDPPYKLVPVHLDSIL

SEQ ID NO: 136 - protein, 364 aa, Homo sapiens
MHRLIFVYTLICANFCSCRDTSATPQSASIKALRNANLRRDDLYRRDETIQVKGNGYVQSPRFPNSYPRNLLLTWRLHSQENTRIQLVFDNQFGLEEAENDICRYDFVEVEDISETSTIIRGRWCGHKEVPPRIKSRTNQIKITFKSDDYFVAKPGFKIYYSLLEDFQPAAASETNWESVTSSISGVSYNSPSVTDPTLIADALDKKIAEFDTVEDLLKYFNPESWQEDLENMYLDTPRYRGRSYHDRKSKVDLDRLNDDAKRYSCTPRNYSVNIREELKLANVVFFPRCLLVQRCGGNCGCGTVNWRSCTCNSGKTVKKYHEVLQFEPGHIKRRGRAKTMALVDIQLDHHERCDCICSSRPPR

SEQ ID NO: 137 - protein, 798 aa, Homo sapiens
MNLQPIFWIGLISSVCCVFAQTDENRCLKANAKSCGECIQAGPNCGWCTNSTFLQEGMPTSARCDDLEALKKKGCPPDDIENPRGSKDIKKNKNVTNRSKGTAEKLKPEDITQIQPQQLVLRLRSGEPQTFTLKFKRAEDYPIDLYYLMDLSYSMKDDLENVKSLGTDLMNEMRRITSDFRIGFGSFVEKTVMPYISTTPAKLRNPCTSEQNCTSPFSYKNVLSLTNKGEVFNELVGKQRISGNLDSPEGGFDAIMQVAVCGSLIGWRNVTRLLVFSTDAGFHFAGDGKLGGIVLPNDGQCHLENNMYTMSHYYDYPSIAHLVQKLSENNIQTIFAVTEEFQPVYKELKNLIPKSAVGTLSANSSNVIQLIIDAYNSLSSEVILENGKLSEGVTISYKSYCKNGVNGTGENGRKCSNISIGDEVQFEISITSNKCPKKDSDSFKIRPLGFTEEVEVILQYICECECQSEGIPESPKCHEGNGTFECGACRCNEGRVGRHCECSTDEVNSEDMDAYCRKENSSEICSNNGECVCGQCVCRKRDNTNEIYSGKFCECDNFNCDRSNGLICGGNGVCKCRVCECNPNYTGSACDCSLDTSTCEASNGQICNGRGICECGVCKCTDPKFQGQTCEMCQTCLGVCAEHKECVQCRAFNKGEKKDTCTQECSYFNITKVESRDKLPQPVQPDPVSHCKEKDVDDCWFYFTYSVNGNNEVMVHVVENPECPTGPDIIPIVAGVVAGIVLIGLALLLIWKLLMIIHDRREFAKFEKEKMNAKWDTGENPIYKSAVTTVVNPKYEGK

SEQ ID NO: 138 - protein, 296 aa, Homo sapiens
MRGQRSLLLGPARLCLRLLLLLGYRRRCPPLLRGLVQRWRYGKVCLRSLLYNSFGGSDTAVDAAFEPVYWLVDNVIRWFGVGRNDIATVSICKKCIYPKPARTHHCSICNRCVLKMDHHCPWLNNCVGHYNHRYFFSFCFFMTLGCVYCSYGSWDLFREAYAAIETYHQTPPPTFSFRERMTHKSLVYLWFLCSSVALALGALTVWHAVLISRGETSIERHINKKERRRLQAKGRVFRNPYNYGCLDNWKVFLGVDTGRHWLTRVLLPSSHLPHGNGMSWEPPPWVTAHSASVMAV

SEQ ID NO: 139 - protein, 647 aa, Homo sapiens
MPGKMVVILGASNILWIMFAASQAFKIETTPESRYLAQIGDSVSLTCSTTGCESPFFSWRTQIDSPLNGKVTNEGTTSTLTMNPVSFGNEHSYLCTATCESRKLEKGIQVEIYSFPKDPEIHLSGPLEAGKPITVKCSVADVYPFDRLEIDLLKGDHLMKSQEFLEDADRKSLETKSLEVTFTPVIEDIGKVLVCRAKLHIDEMDSVPTVRQAVKELQVYISPKNTVISVNPSTKLQEGGSVTMTCSSEGLPAPEIFWSKKLDNGNLQHLSGNATLTLIAMRMEDSGIYVCEGVNLIGKNRKEVELIVQAFPRDPEIEMSGGLVNGSSVTVSCKVPSVYPLDRLEIELLKGETILENIEFLEDTDMKSLENKSLEMTFIPTIEDTGKALVCQAKLHIDDMEFEPKQRQSTQTLYVNVAPRDTTVLVSPSSILEEGSSVNMTCLSQGFPAPKILWSRQLPNGELQPLSENATLTLISTKMEDSGVYLCEGINQAGRSRKEVELIIQVTPKDIKLTAFPSESVKEGDTVIISCTCGNVPETWIILKKKAETGDTVLKSIDGAYTIRKAQLKDAGVYECESKNKVGSQLRSLTLDVQGRENNKDYFSPELLVLYFASSLIIPAIGMIIYFARKANMKGSYSLVEAQKSKV

SEQ ID NO: 140 - protein, 571 aa, Homo sapiens
MERAVRVESGVLVGVVCLLLACPATATGPEVAQPEVDTTLGRVRGRQVGVKGTDRLVNVFLGIPFAQPPLGPDRFSAPHPAQPWEGVRDASTAPPMCLQDVESMNSSRFVLNGKQQIFSVSEDCLVLNVYSPAEVPAGSGRPVMVWVHGGALITGAATSYDGSALAAYGDVVVVTVQYRLGVLGFFSTGDEHAPGNQGFLDVVAALRWVQENIAPFGGDLNCVTVFGGSAGGSIISGLVLSPVAAGLFHRAITQSGVITTPGIIDSHPWPLAQKIANTLACSSSSPAEMVQCLQQKEGEELVLSKKLKNTIYPLTVDGTVFPKSPKELLKEKPFHSVPFLMGVNNHEFSWLIPRGWGLLDTMEQMSREDMLAISTPVLTSLDVPPEMMPTVIDEYLGSNSDAQAKCQAFQEFMGDVFINVPTVSFSRYLRDSGSPVFFYEFQHRPSSFAKIKPAWVKADHGAEGAFVFGGPFLMDESSRLAFPEATEEEKQLSLTMMAQWTHFARTGDPNSKALPPWPQFNQAEQYLEINPVPRAGQKFREAWMQFWSETLPSKIQQWHQKQKNRKAQEDL

SEQ ID NO: 141 - protein, 387 aa, Homo sapiens
MPVPASWPHPPGPFLLLTLLLGLTEVAGEEELQMIQPEKLLLVTVGKTATLHCTVTSLLPVGPVLWFRGVGPGRELIYNQKEGHFPRVTTVSDLTKRNNMDFSIRISSITPADVGTYYCVKFRKGSPENVEFKSGPGTEMALGAKPSAPVVLGPAARTTPEHTVSFTCESHGFSPRDITLKWFKNGNELSDFQTNVDPTGQSVAYSIRSTARVVLDPWDVRSQVICEVAHVTLQGDPLRGTANLSEAIRVPPTLEVTQQPMRVGNQVNVTCQVRKFYPQSLQLTWSENGNVCQRETASTLTENKDGTYNWTSWFLVNISDQRDDVVLTCQVKHDGQLAVSKRLALEVTVHQKDQSSDATPGPASSLTALLLIAVLLGPIYVPWKQKT

SEQ ID NO: 142 - protein, 98 aa, Homo sapiens
MNQTAILICCLIFLTLSGIQGVPLSRTVRCTCISISNQPVNPRSLEKLEIIPASQFCPRVEIIATMKKKGEKRCLNPESKAIKNLLKAVSKERSKRSP

SEQ ID NO: 143 - protein, 459 aa, Homo sapiens
MTILGTTFGMVFSLLQVVSGESGYAQNGDLEDAELDDYSFSCYSQLEVNGSQHSLTCAFEDPDVNITNLEFEICGALVEVKCLNFRKLQEIYFIETKKFLLIGKSNICVKVGEKSLTCKKIDLTTIVKPEAPFDLSVVYREGANDFVVTFNTSHLQKKYVKVLMHDVAYRQEKDENKWTHVNLSSTKLTLLQRKLQPAAMYEIKVRSIPDHYFKGFWSEWSPSYYFRTPEINNSSGEMDPILLTISILSFFSVALLVILACVLWKKRIKPIVWPSLPDHKKTLEHLCKKPRKNLNVSFNPESFLDCQIHRVDDIQARDEVEGFLQDTFPQQLEESEKQRLGGDVQSPNCPSEDVVITPESFGRDSSLTCLAGNVSACDAPILSSSRSLDCRESGKNGPHVYQDLLLSLGTTNSTLPPPFSLQSGILTLNPVAQGQPILTSLGSNQEEAYVTMSSFYQNQ

SEQ ID NO: 144 - protein, 518 aa, Homo sapiens
MALERLCSVLKVLLITVLVVEGIAVAQKTQDGQNIGIKHIPATQCGIWVRTSNGGHFASPNYPDSYPPNKECIYILEAAPRQRIELTFDEHYYIEPSFECRFDHLEVRDGPFGFSPLIDRYCGVKSPPLIRSTGRFMWIKFSSDEELEGLGFRAKYSFIPDPDFTYLGDCQFELSGADGIVRSSQVEQEEKTKPGQAVDCIWTIKATPKAKIYLRFLDYQMEHSNECKRNFVAVYDGSSSIENLKAKFCSTVANDVMLKTGIGVIRMWADEGSRLSRFRMLFTSFVEPPCTSSTFFCHSNMCINNSLVCNGVQNCAYPWDENHCKEKKKAGVFEQITKTHGTIIGITSGIVLVLLIISILVQVKQPRKKVMACKTAFNKTGFQEVFDPPHYELFSLRDKEISADLADLSEELDNYQKMRRSSTASRCIHDHHCGSQASSVKQSRTNLSSMELPFRNDFAQPQPMKTFNSTFKKSSYTFKQGHECPEQALEDRVMEEIPCEIYVRGREDSAQASISIDF

SEQ ID NO: 145 - protein, 94 aa, Homo sapiens
MSVKGMAIALAVILCATVVQGFPMFKRGRCLCIGPGVKAVKVADIEKASIMYPSNNCDKIEVIITLKENKGQRCLNPKSKQARLIIKKVERKNF

SEQ ID NO: 146 - protein, 1479 aa, Homo sapiens
MGPGRPAPAPWPRHLLRCVLLLGCLHLGRPGAPGDAALPEPNVFLIFSHGLQGCLEAQGGQVRVTPACNTSLPAQRWKWVSRNRLFNLGTMQCLGTGWPGTNTTASLGMYECDREALNLRWHCRTLGDQLSLLLGARTSNISKPGTLERGDQTRSGQWRIYGSEEDLCALPYHEVYTIQGNSHGKPCTIPFKYDNQWFHGCTSTGREDGHLWCATTQDYGKDERWGFCPIKSNDCETFWDKDQLTDSCYQFNFQSTLSWREAWASCEQQGADLLSITEIHEQTYINGLLTGYSSTLWIGLNDLDTSGGWQWSDNSPLKYLNWESDQPDNPSEENCGVIRTESSGGWQNRDCSIALPYVCKKKPNATAEPTPPDRWANVKVECEPSWQPFQGHCYRLQAEKRSWQESKKACLRGGGDLVSIHSMAELEFITKQIKQEVEELWIGLNDLKLQMNFEWSDGSLVSFTHWHPFEPNNFRDSLEDCVTIWGPEGRWNDSPCNQSLPSICKKAGQLSQGAAEEDHGCRKGWTWHSPSCYWLGEDQVTYSEARRLCTDHGSQLVTITNRFEQAFVSSLIYNWEGEYFWTALQDLNSTGSFFWLSGDEVMYTHWNRDQPGYSRGGCVALATGSAMGLWEVKNCTSFRARYICRQSLGTPVTPELPGPDPTPSLTGSCPQGWASDTKLRYCYKVFSSERLQDKKSWVQAQGACQELGAQLLSLASYEEEHFVANMLNKIFGESEPEIHEQHWFWIGLNRRDPRGGQSWRWSDGVGFSYHNFDRSRHDDDDIRGCAVLDLASLQWVAMQCDTQLDWICKIPRGTDVREPDDSPQGRREWLRFQEAEYKFFEHHSTWAQAQRICTWFQAELTSVHSQAELDFLSHNLQKFSRAQEQHWWIGLHTSESDGRFRWTDGSIINFISWAPGKPRPVGKDKKCVYMTASREDWGDQRCLTALPYICKRSNVTKETQPPDLPTTALGGCPSDWIQFLNKCFQVQGQEPQSRVKWSEAQFSCEQQEAQLVTITNPLEQAFITASLPNVTFDLWIGLHASQRDFQWVEQEPLMYANWAPGEPSGPSPAPSGNKPTSCAVVLHSPSAHFTGRWDDRSCTEETHGFICQKGTDPSLSPSPAALPPAPGTELSYLNGTFRLLQKPLRWHDALLLCESRNASLAYVPDPYTQAFLTQAARGLRTPLWIGLAGEEGSRRYSWVSEEPLNYVGWQDGEPQQPGGCTYVDVDGAWRTTSCDTKLQGAVCGVSSGPPPPRRISYHGSCPQGLADSAWIPFREHCYSFHMELLLGHKEARQRCQRAGGAVLSILDEMENVFVWEHLQSYEGQSRGAWLGMNFNPKGGTLVWQDNTAVNYSNWGPPGLGPSMLSHNSCYWIQSNSGLWRPGACTNITMGVVCKLPRAEQSSFSPSALPENPAALVVVLMAVLLLLALLTAALILYRRRQSIERGAFEGARYSRSSSSPTEATEKNILVSDMEMNEQQE

SEQ ID NO: 147 - protein, 757 aa, Homo sapiens
MLLRLLLAWAAAGPTLGQDPWAAEPRAACGPSSCYALFPRRRTFLEAWRACRELGGDLATPRTPEEAQRVDSLVGAGPASRLLWIGLQRQARQCQLQRPLRGFTWTTGDQDTAFTNWAQPASGGPCPAQRCVALEASGEHRWLEGSCTLAVDGYLCQFGFEGACPALQDEAGQAGPAVYTTPFHLVSTEFEWLPFGSVAAVQCQAGRGASLLCVKQPEGGVGWSRAGPLCLGTGCSPDNGGCEHECVEEVDGHVSCRCTEGFRLAADGRSCEDPCAQAPCEQQCEPGGPQGYSCHCRLGFRPAEDDPHRCVDTDECQIAGVCQQMCVNYVGGFECYCSEGHELEADGISCSPAGAMGAQASQDLGDELLDDGEDEEDEDEAWKAFNGGWTEMPGILWMEPTQPPDFALAYRPSFPEDREPQIPYPEPTWPPPLSAPRVPYHSSVLSVTRPVVVSATHPTLPSAHQPPVIPATHPALSRDHQIPVIAANYPDLPSAYQPGILSVSHSAQPPAHQPPMISTKYPELFPAHQSPMFPDTRVAGTQTTTHLPGIPPNHAPLVTTLGAQLPPQAPDALVLRTQATQLPIIPTAQPSLTTTSRSPVSPAHQISVPAATQPAALPTLLPSQSPTNQTSPISPTHPHSKAPQIPREDGPSPKLALWLPSPAPTAAPTALGEAGLAEHSQRDDRWLLVALLVPTCVFLVVLLALGIVYCTRCGPHAPNKRITDCYRWVIHAGSKSPTEPMPPRGSLTGVQTCRTSV

SEQ ID NO: 148 - protein, 821 aa, Homo sapiens
MVSWGRFICLVVVTMATLSLARPSFSLVEDTTLEPEEPPTKYQISQPEVYVAAPGESLEVRCLLKDAAVISWTKDGVHLGPNNRTVLIGEYLQIKGATPRDSGLYACTASRTVDSETWYFMVNVTDAISSGDDEDDTDGAEDFVSENSNNKRAPYWTNTEKMEKRLHAVPAANTVKFRCPAGGNPMPTMRWLKNGKEFKQEHRIGGYKVRNQHWSLIMESVVPSDKGNYTCVVENEYGSINHTYHLDVVERSPHRPILQAGLPANASTVVGGDVEFVCKVYSDAQPHIQWIKHVEKNGSKYGPDGLPYLKVLKVFAAGVNTTDKEIEVLYIRNVTFEDAGEYTCLAGNSIGISFHSAWLTVLPAPGREKEITASPDYLEIAIYCIGVFLIACMVVTVILCRMKNTTKKPDFSSQPAVHKLTKRIPLRRQVSAESSSSMNSNTPLVRITTRLSSTADTPMLAGVSEYELPEDPKWEFPRDKLTLGKPLGEGCFGQVVMAEAVGIDKDKPKEAVTVAVKMLKDDATEKDLSDLVSEMEMMKMIGKHKNIINLLGACTQDGPLYVIVEYASKGNLREYLRARRPPGMEYSYDINRVPEEQMTFKDLVSCTYQLARGMEYLASQKCIHRDLAARNVLVTENNVMKIADFGLARDINNIDYYKKTTNGRLPVKWMAPEALFDRVYTHQSDVWSFGVLMWEIFTLGGSPYPGIPVEELFKLLKEGHRMDKPANCTNELYMMMRDCWHAVPSQRPTFKQLVEDLDRILTLTTNEEYLDLSQPLEQYSPSYPDTRSSCSSGDDSVFSPDPMPYEPCLPQYPHINGSVKT

SEQ ID NO: 149 - protein, 484 aa, Homo sapiens [sequence omitted]

SEQ ID NO: 150 - protein, 376 aa, Homo sapiens
MALTAHPSCLLALLVAGLAQGIRGPLRAQDLGPQPLELKEAFKLFQIQFNRSYLSPEEHAHRLDIFAHNLAQAQRLQEEDLGTAEFGVTPFSDLTEEEFGQLYGYRRAAGGVPSMGREIRSEEPEESVPFSCDWRKVASAISPIKDQKNCNCCWAMAAAGNIETLWRISFWDFVDVSVQELLDCGRCGDGCHGGFVWDAFITVLNNSGLASEKDYPFQGKVRAHRCHPKKYQKVAWIQDFIMLQNNEHRIAQYLATYGPITVTINMKPLQLYRKGVIKATPTTCDPQLVDHSVLLVGFGSVKSEEGIWAETVSSQSQPQPPHPTPYWILKNSWGAQWGEKGYFRLHRGSNTCGITKFPLTARVQKPDMKPRVSCPP

SEQ ID NO: 151 - protein, 337 aa, Homo sapiens
MGPRARPALLLLMLLQTAVLQGRLLRSHSLHYLFMGASEQDLGLSLFEALGYVDDQLFVFYDHESRRVEPRTPWVSSRISSQMWLQLSQSLKGWDHMFTVDFWTIMENHNHSKESHTLQVILGCEMQEDNSTEGYWKYGYDGQDHLEFCPDTLDWRAAEPRAWPTKLEWERHKIRARQNRAYLERDCPAQLQQLLELGRGVLDQQVPPLVKVTHHVTSSVTTLRCRALNYYPQNITMKWLKDKQPMDAKEFEPKDVLPNGDGTYQGWITLAVPPGEEQRYTCQVEHPGLDQPLIVIWEPSPSGTLVIGVISGIAVFVVILFIGILFIILRKRQGSSF

SEQ ID NO: 152 - protein, 301 aa, Homo sapiens
MFSHLPFDCVLLLLLLLLTRSSEVEYRAEVGQNAYLPCFYTPAAPGNLVPVCWGKGACPVFECGNVVLRTDERDVNYWTSRYWLNGDFRKGDVSLTIENVTLADSGIYCCRIQIPGIMNDEKFNLKLVIKPAKVTPAPTRQRDFTAAFPRMLTTRGHGPAETQTLGSLPDINLTQISTLANELRDSRLANDLRDSGATIRIGIYIGAGICAGLALALIFGALIFKWYSHSKEKIQNLSLISLANLPPSGLANAVAEGIRSEENIYTIEENVYEVEEPNEYYCYVSSRQQPSQPLGCRFAMP

SEQ ID NO: 153 - protein, 168 aa, Homo sapiens
MGPRARPALLLLMLLQTAVLQGRLLLPPLVKVTHHVTSSVTTLRCRALNYYPQNITMKWLKDKQPMDAKEFEPKDVLPNGDGTYQGWITLAVPPGEEQRYTCQVEHPGLDQPLIVIWEPSPSGTLVIGVISGIAVFVVILFIGILFIILRKRQGSRGAMGHYVLAERE

SEQ ID NO: 154 - protein, 397 aa, Homo sapiens
MRCPKCLLCLSALLTLLGLKVYIEWTSESRLSKAYPSPRGTPPSPTPANPEPTLPANLSTRLGQTIPLPFAYWNQQQWRLGSLPSGDSTETGGCQAWGAAAATEIPDFASYPKDLRRFLLSAACRSFPQWLPGGGGSQVSSCSDTDVPYLLLAVKSEPGRFAERQAVRETWGSPAPGIRLLFLLGSPVGEAGPDLDSLVAWESRRYSDLLLWDFLDVPFNQTLKDLLLLAWLGRHCPTVSFVLRAQDDAFVHTPALLAHLRALPPASARSLYLGEVFTQAMPLRKPGGPFYVPESFFEGGYPAYASGGGYVIAGRLAPWLLRAAARVAPFPFEDVYTGLCIRALGLVPQAHPGFLTAWPADRTADHCAFRNLLLVRPLGPQASIRLWKQLQDPRLQC

SEQ ID NO: 155 - protein, 273 aa, Homo sapiens
MLGQVVTLILLLLLKVYQGKGCQGSADHVVSISGVPLQLQPNSIQTKVDSIAWKKLLPSQNGFHHILKWENGSLPSNTSNDRFSFIVKNLSLLIKAAQQQDSGLYCLEVTSISGKVQTATFQVFVFEFRFWPFLVIIVILSALFLGTLACFCVWRRKRKEKQSETSPKEFLTIYEDVKDLKTRRNHEQEQTFPGGGSTIYSMIQSQSSAPTSQEPAYTLYSLIQPSRKSGSRKRNHSPSFNSTIYEVIGKSQPKAQNPARLSRKELENFDVYS

SEQ ID NO: 156 - protein, 256 aa, Homo sapiens
MGPRARPALLLLMLLQTAVLQGRLLRSHSLHYLFMGASEQDLGLSLFEALGYVDDQLFVFYDHESRRVEPRTPWVSSRISSQMWLQLSQSLKGWDHMFTVDFWTIMENHNHSKVPPLVKVTHHVTSSVTTLRCRALNYYPQNITMKWLKDKQPMDAKEFEPKDVLPNGDGTYQGWITLAVPPGEEQRYTCQVEHPGLDQPLIVIWEPSPSGTLVIGVISGIAVFVVILFIGILFIILRKRQGSRGAMGHYVLAERE

SEQ ID NO: 157 - protein, 502 aa, Homo sapiens
MSCPVPACCALLLVLGLCRARPRNALLLLADDGGFESGAYNNSAIATPHLDALARRSLLFRNAFTSVSSCSPSRASLLTGLPQHQNGMYGLHQDVHHFNSFDKVRSLPLLLSQAGVRTGIIGKKHVGPETVYPFDFAYTEENGSVLQVGRNITRIKLLVRKFLQTQDDRPFFLYVAFHDPHRCGHSQPQYGTFCEKFGNGESGMGRIPDWTPQAYDPLDVLVPYFVPNTPAARADLAAQYTTVGRMDQGVGLVLQELRDAGVLNDTLVIFTSDNGIPFPSGRTNLYWPGTAEPLLVSSPEHPKRWGQVSEAYVSLLDLTPTILDWFSIPYPSYAIFGSKTIHLTGRSLLPALEAEPLWATVFGSQSHHEVTMSYPMRSVQHRHFRLVHNLNFKMPFPIDQDFYVSPTFQDLLNRTTAGQPTGWYKDLRHYYYRARWELYDRSRDPHETQNLATDPRFAQLLEMLRDQLAKWQWETHDPWVCAPDGVLEEKLSPQCQPLHNEL

SEQ ID NO: 158 - protein, 716 aa, Homo sapiens
MARMSFVIAACQLVLGLLMTSLTESSIQNSECPQLCVCEIRPWFTPQSTYREATTVDCNDLRLTRIPSNLSSDTQVLLLQSNNIAKTVDELQQLFNLTELDFSQNNFTNIKEVGLANLTQLTTLHLEENQITEMTDYCLQDLSNLQELYINHNQISTISAHAFAGLKNLLRLHLNSNKLKVIDSRWFDSTPNLEILMIGENPVIGILDMNFKPLANLRSLVLAGMYLTDIPGNALVGLDSLESLSFYDNKLVKVPQLALQKVPNLKFLDLNKNPIHKIQEGDFKNMLRLKELGINNMGELVSVDRYALDNLPELTKLEATNNPKLSYIHRLAFRSVPALESLMLNNNALNAIYQKTVESLPNLREISIHSNPLRCDCVIHWINSNKTNIRFMEPLSMFCAMPPEYKGHQVKEVLIQDSSEQCLPMISHDSFPNRLNVDIGTTVFLDCRAMAEPEPEIYWVTPIGNKITVETLSDKYKLSSEGTLEISNIQIEDSGRYTCVAQNVQGADTRVATIKVNGTLLDGTQVLKIYVKQTESHSILVSWKVNSNVMTSNLKWSSATMKIDNPHITYTARVPVDVHEYNLTHLQPSTDYEVCLTVSNIHQQTQKSCVNVTTKNAAFAVDISDQETSTALAAVMGSMFAVISLASIAVYFAKRFKRKNYHHSLKKYMQKTSSIPLNELYPPLINLWEGDSEKDKDGSADTKPTQVDTSRSYYMW

SEQ ID NO: 159 - protein, 350 aa, Homo sapiens
MQRLGATLLCLLLAAAVPTAPAPAPTATSAPVKPGPALSYPQEEATLNEMFREVEELMEDTQHKLRSAVEEMEAEEAAAKASSEVNLANLPPSYHNETNTDTKVGNNTIHVHREIHKITNNQTGQMVFSETVITSVGDEEGRRSHECIIDEDCGPSMYCQFASFQYTCQPCRGQRMLCTRDSECCGDQLCVWGHCTKMATRGSNGTICDNQRDCQPGLCCAFQRGLLFPVCTPLPVEGELCHDPASRLLDLITWELEPDGALDRCPCASGLLCQPHSHSLVYVCKPTFVGSRDQDGEILLPREVPDEYEVGSFMEEVRQELEDLERSLTEEMALREPAAAAAALLGGEEI

SEQ ID NO: 160 - protein, 449 aa, Homo sapiens
MMKTLLLFVGLLLTWESGQVLGDQTVSDNELQEMSNQGSKYVNKEIQNAVNGVKQIKTLIEKTNEERKTLLSNLEEAKKKKEDALNETRESETKLKELPGVCNETMMALWEECKPCLKQTCMKFYARVCRSGSGLVGRQLEEFLNQSSPFYFWMNGDRIDSLLENDRQQTHMLDVMQDHFSRASSIIDELFQDRFFTREPQDTYHYLPFSLPHRRPHFFFPKSRIVRSLMPFSPYEPLNFHAMFQPFLEMIHEAQQAMDIHFHSPAFQHPPTEFIREGDDDRTVCREIRHNSTGCLRMKDQCDKCREILSVDCSTNNPSQAKLRRELDESLQVAERLTRKYNELLKSYQWKMLNTSSLLEQLNEQFNWVSRLANLTQGEDQYYLRVTTVASHTSDSDVPSGVTEVVVKLFDSDPITVTVPVEVSRKNPKFMETVAEKALQEYRKKHREE

SEQ ID NO: 161 - protein, 1349 aa, Homo sapiens
MIWYVATFIASVIGTRGLAAEGAHGLREEPEFVTARAGESVVLRCDVIHPVTGQPPPYVVEWFKFGVPIPIFIKFGYYPPHVDPEYAGRASLHDKASLRLEQVRSEDQGWYECKVLMLDQQYDTFHNGSWVHLTINAPPTFTETPPQYIEAKEGGSITMTCTAFGNPKPIVTWLKEGTLLGASGKYQVSDGSLTVTSVSREDRGAYTCRAYSIQGEAVHTTHLLVQGPPFIVSPPENITVNISQDALLTCRAEAYPGNLTYTWYWQDENVYFQNDLKLRVRILIDGTLIIFRVKPEDSGKYTCVPSNSLGRSPSASAYLTVQYPARVLNMPPVIYVPVGIHGYIRCPVDAEPPATVVKWNKDGRPLQVEKNLGWTLMEDGSIRIEEATEEALGTYTCVPYNTLGTMGQSAPARLVLKDPPYFTVLPGWEYRQEAGRELLIPCAAAGDPFPVITWRKVGKPSRSKHSALPSGSLQFRALSKEDHGEWECVATNVVTSITASTHLTVIGTSPHAPGSVRVQVSMTTANVSWEPGYDGGYEQTFSVWMKRAQFGPHDWLSLPVPPGPSWLLVDTLEPETAYQFSVLAQNKLGTSAFSEVVTVNTLAFPITTPEPLVLVTPPRCLIANRTQQGVLLSWLPPANHSFPIDRYIMEFRVAERWELLDDGIPGTEGEFFAKDLSQDTWYEFRVLAVMQDLISEPSNIAGVSSTDIFPQPDLTEDGLARPVLAGIVATICFLAAAILFSTLAACFVNKQRKRKLKRKKDPPLSITHCRKSLESPLSSGKVSPESIRTLRAPSESSDDQGQPAAKRMLSPTREKELSLYKKTKRAISSKKYSVAKAEAEAEATTPIELISRGPDGRFVMDPAEMEPSLKSRRIEGFPFAEETDMYPEFRQSDEENEDPLVPTSVAALKSQLTPLSSSQESYLPPPAYSPRFQPRGLEGPGGLEGRLQATGQARPPAPRPFHHGQYYGYLSSSSPGEVEPPPFYVPEVGSPLSSVMSSPPLPTEGPFGHPTIPEENGENASNSTLPLTQTPTGGRSPEPWGRPEFPFGGLETPAMMFPHQLPPCDVPESLQPKAGLPRGLPPTSLQVPAAYPGILSLEAPKGWAGKSPGRGPVPAPPAAKWQDRPMQPLVSQGQLRHTSQGMGIPVLPYPEPAEPGAHGGPSTFGLDTRWYEPQPRPRPSPRQARRAEPSLHQVVLQPSRLSPLTQSPLSSRTGSPELAARARPRPGLLQQAEMSEITLQPPAAVSFSRKSTPSTGSPSQSSRSGSPSYRPAMGFTTLATGYPSPPPGPAPAGPGDSLDVFGQTPSPRRTGEELLRPETPPPTLPTSGKLQRDRPAPATSPPERALSKL

SEQ ID NO: 162 - protein, 858 aa, Homo sapiens
MLQTKDLIWTLFFLGTAVSLQVDIVPSQGEISVGESKFFLCQVAGDAKDKDISWFSPNGEKLTPNQQRISVVWNDDSSSTLTIYNANIDDAGIYKCVVTGEDGSESEATVNVKIFQKLMFKNAPTPQEFREGEDAVIVCDVVSSLPPTIIWKHKGRDVILKKDVRFIVLSNNYLQIRGIKKTDEGTYRCEGRILARGEINFKDIQVIVNVPPTIQARQNIVNATANLGQSVTLVCDAEGFPEPTMSWTKDGEQIEQEEDDEKYIFSDDSSQLTIKKVDKNDEAEYICIAENKAGEQDATIHLKVFAKPKITYVENQTAMELEEQVTLTCEASGDPIPSITWRTSTRNISSEEKASWTRPEKQETLDGHMVVRSHARVSSLTLKSIQYTDAGEYICTASNTIGQDSQSMYLEVQYAPKLQGPVAVYTWEGNQVNITCEVFAYPSATISWFRDGQLLPSSNYSNIKIYNTPSASYLEVTPDSENDFGNYNCTAVNRIGQESLEFILVQADTPSSPSIDQVEPYSSTAQVQFDEPEATGGVPILKYKAEWRAVGEEVWHSKWYDAKEASMEGIVTIVGLKPETTYAVRLAALNGKGLGEISAASEFKTQPVQGEPSAPKLEGQMGEDGNSIKVNLIKQDDGGSPIRHYLVRYRALSSEWKPEIRLPSGSDHVMLKSLDWNAEYEVYVVAENQQGKSKAAHFVFRTSAQPTAIPANGSPTSGLSTGAIVGILIVIFVLLLVVVDITCYFLNKCGLFMCIAVNLCGKAGPGAKGKDMEEGKAAFSKDESKEPIVEVRTEEERTPNHDGGKHTEPNETTPLTEPEKGPVEAKPECQETETKPAPAEVKTVPNDATQTKENESKA

SEQ ID NO: 163 - protein, 823 aa, Homo sapiens
MGGRVFLVFLAFCVWLTLPGAETQDSRGCARWCPQDSSCVNATACRCNPGFSSFSEIITTPMETCDDINECATLSKVSCGKFSDCWNTEGSYDCVCSPGYEPVSGAKTFKNESENTCQDVDECQQNPRLCKSYGTCVNTLGSYTCQCLPGFKLKPEDPKLCTDVNECTSGQNPCHSSTHCLNNVGSYQCRCRPGWQPIPGSPNGPNNTVCEDVDECSSGQHQCDSSTVCFNTVGSYSCRCRPGWKPRHGIPNNQKDTVCEDMTFSTWTPPPGVHSQTLSRFFDKVQDLGRDYKPGLANNTIQSILQALDELLEAPGDLETLPRLQQHCVASHLLDGLEDVLRGLSKNLSNGLLNFSYPAGTELSLEVQKQVDRSVTLRQNQAVMQLDWNQAQKSGDPGPSVVGLVSIPGMGKLLAEAPLVLEPEKQMLLHETHQGLLQDGSPILLSDVISAFLSNNDTQNLSSPVTFTFSHRSVIPRQKVLCVFWEHGQNGCGHWATTGCSTIGTRDTSTICRCTHLSSFAVLMAHYDVQEEDPVLTVITYMGLSVSLLCLLLAALTFLLCKAIQNTSTSLHLQLSLCLFLAHLLFLVAIDQTGHKVLCSIIAGTLHYLYLATLTWMLLEALYLFLTARNLTVVNYSSINRFMKKLMFPVGYGVPAVTVAISAASRPHLYGTPSRCWLQPEKGFIWGFLGPVCAIFSVNLVLFLVTLWILKNRLSSLNSEVSTLRNTRMLAFKATAQLFILGCTWCLGILQVGPAARVMAYLFTIINSLQGVFIFLVYCLLSQQVREQYGKWSKGIRKLKTESEMHTLSSSAKADTSKPSTVN

SEQ ID NO: 164 - protein, 424 aa, Homo sapiens
MRAPGCGRLVLPLLLLAAAALAEGDAKGLKEGETPGNFMEDEQWLSSISQYSGKIKHWNRFRDEVEDDYIKSWEDNQQGDEALDTTKDPCQKVKCSRHKVCIAQGYQRAMCISRKKLEHRIKQPTVKLHGNKDSICKPCHMAQLASVCGSDGHTYSSVCKLEQQACLSSKQLAVRCEGPCPCPTEQAATSTADGKPETCTGQDLADLGDRLRDWFQLLHENSKQNGSASSVAGPASGLDKSLGASCKDSIGWMFSKLDTSADLFLDQTELAAINLDKYEVCIRPFFNSCDTYKDGRVSTAEWCFCFWREKPPCLAELERIQIQEAAKKKPGIFIPSCDEDGYYRKMQCDQSSGDCWCVDQLGLELTGTRTHGSPDCDDIVGFSGDFGSGVGWEDEEEKETEEAGEEAEEEEGEAGEADDGGYIW

SEQ ID NO: 165 - protein, 425 aa, Homo sapiens
MGPRRLLLVAACFSLCGPLLSARTRARRPESKATNATLDPRSFLLRNPNDKYEPFWEDEEKNESGLTEYRLVSINKSSPLQKQLPAFISEDASGYLTSSWLTLFVPSVYTGVFVVSLPLNIMAIVVFILKMKVKKPAVVYMLHLATADVLFVSVLPFKISYYFSGSDWQFGSELCRFVTAAFYCNMYASILLMTVISIDRFLAVVYPMQSLSWRTLGRASFTCLAIWALAIAGVVPLLLKEQTIQVPGLNITTCHDVLNETLLEGYYAYYFSAFSAVFFFVPLIISTVCYVSIIRCLSSSAVANRSKKSRALFLSAAVFCIFIICFGPTNVLLIAHYSFLSHTSTTEAAYFAYLLCVCVSSISCCIDPLIYYYASSECQRYVYSILCCKESSDPSSYNSSGQLMASKMDTCSSNLNNSIYKKLLT

SEQ ID NO: 166 - protein, 629 aa, Homo sapiens
MNQVTIQWDAVIALYILFSWCHGGITNINCSGHIWVEPATIFKMGMNISIYCQAAIKNCQPRKLHFYKNGIKERFQITRINKTTARLWYKNFLEPHASMYCTAECPKHFQETLICGKDISSGYPPDIPDEVTCVIYEYSGNMTCTWNAGKLTYIDTKYVVHVKSLETEEEQQYLTSSYINISTDSLQGGKKYLVWVQAANALGMEESKQLQIHLDDIVIPSAAVISRAETINATVPKTIIYWDSQTTIEKVSCEMRYKATTNQTWNVKEFDTNFTYVQQSEFYLEPNIKYVFQVRCQETGKRYWQPWSSLFFHKTPETVPQVTSKAFQHDTWNSGLTVASISTGHLTSDNRGDIGLLLGMIVFAVMLSILSLIGIFNRSFRTGIKRRILLLIPKWLYEDIPNMKNSNVVKMLQENSELMNNNSSEQVLYVDPMITEIKEIFIPEHKPTDYKKENTGPLETRDYPQNSLFDNTTVVYIPDLNTGYKPQISNFLPEGSHLSNNNEITSLTLKPPVDSLDSGNNPRLQKHPNFAFSVSSVNSLSNTIFLGELSLILNQGECSSPDIQNSVEEETTMLLENDSPSETIPEQTLLPDEFVSCLGIVNEELPSINTYFPQNILESHFNRISLLEK

SEQ ID NO: 167 - protein, 255 aa, Homo sapiens
MAFRQALQLAACGLAGGSAAVLFSAVAVGKPRAGGDAEPRPAEPPAWAGGARPGPGVWDPNWDRREPLSLINVRKRNVESGEEELASKLDHYKAKATRHIFLIRHSQYHVDGSLEKDRTLTPLGREQAELTGLRLASLGLKFNKIVHSSMTRAIETTDIISRHLPGVCKVSTDLLREGAPIEPDPPVSHWKPEAVQYYEDGARIEAAFRNYIHRADARQEEDSYEIFICHANVIRYIVCSIPPLLSAGDFVLLGS

SEQ ID NO: 168 - protein, 520 aa, Homo sapiens
MVTSSFPISVAVFALITLQVGTQDSFIAAVYEHAVILPNKTETPVSQEDALNLMNENIDILETAIKQAAEQGARIIVTPEDALYGWKFTRETVFPYLEDIPDPQVNWIPCQDPHRFGHTPVQARLSCLAKDNSIYVLANLGDKKPCNSRDSTCPPNGYFQYNTNVVYNTEGKLVARYHKYHLYSEPQFNVPEKPELVTFNTAFGRFGIFTCFDIFFYDPGVTLVKDFHVDTILFPTAWMNVLPLLTAIEFHSAWAMGMGVNLLVANTHHVSLNMTGSGIYAPNGPKVYHYDMKTELGKLLLSEVDSHPLSSLAYPTAVNWNAYATTIKPFPVQKNTFRGFISRDGFNFTELFENAGNLTVCQKELCCHLSYRMLQKEENEVYVLGAFTGLHGRRRREYWQVCTLLKCKTTNLTTCGRPVETASTRFEMFSLSGTFGTEYVFPEVLLTEIHLSPGKFEVLKDGRLVNKNGSSGPILTVSLFGRWYTKDSLYSSCGTSNSAITYLLIFILLMIIALQNIVML

SEQ ID NO: 169 - protein, 500 aa, Homo sapiens
MRGELWLLVLVLREAARALSPQPGAGHDEGPGSGWAAKGTVRGWNRRARESPGHVSEPDRTQLSQDLGGGTLAMDTLPDNRTRVVEDNHSYYVSRLYGPSEPHSRELWVDVAEANRSQVKIHTILSNTHRQASRVVLSFDFPFYGHPLRQITIATGGFIFMGDVIHRMLTATQYVAPLMANFNPGYSDNSTVVYFDNGTVFVVQWDHVYLQGWEDKGSFTFQAALHHDGRIVFAYKEIPMSVPEISSSQHPVKTGLSDAFMILNPSPDVPESRRRSIFEYHRIELDPSKVTSMSAVEFTPLPTCLQHRSCDACMSSDLTFNCSWCHVLQRCSSGFDRYRQEWMDYGCAQEAEGRMCEDFQDEDHDSASPDTSFSPYDGDLTTTSSSLFIDSLTTEDDTKLNPYAGGDGLQNNLSPKTKGTPVHLGTIVGIVLAVLLVAAIILAGIYINGHPTSNAALFFIERRPHHWPAMKFRSHPDHSTYAEVEPSGHEKEGFMEAEQC

SEQ ID NO: 170 - protein, 137 aa, Homo sapiens
MGLTSQLLPPLFFLLACAGNFVHGHKCDITLQEIIKTLNSLTEQKNTTEKETFCRAATVLRQFYSHHEKDTRCLGATAQQFHRHKQLIRFLKRLDRNLWGLAGLNSCPVKEANQSTLENFLERLKTIMREKYSKCSS

SEQ ID NO: 171 - protein, 1183 aa, Homo sapiens
MQLKIMPKKKRLSAGRVPLILFLCQMISALEVPLDLVQPPTITQQSPKDYIIDPRENIVIQCEAKGKPPPSFSWTRNGTHFDIDKDPLVTMKPGTGTLIINIMSEGKAETYEGVYQCTARNERGAAVSNNIVVRPSRSPLWTKEKLEPITLQSGQSLVLPCRPPIGLPPPIIFWMDNSFQRLPQSERVSQGLNGDLYFSNVLPEDTREDYICYARFNHTQTIQQKQPISVKVISVDELNDTIAANLSDTEFYGAKSSRERPPTFLTPEGNASNKEELRGNVLSLECIAEGLPTPIIYWAKEDGMLPKNRTVYKNFEKTLQIIHVSEADSGNYQCIAKNALGAIHHTISVRVKAAPYWITAPQNLVLSPGEDGTLICRANGNPKPRISWLTNGVPIEIAPDDPSRKIDGDTIIFSNVQERSSAVYQCNASNEYGYLLANAFVNVLAEPPRILTPANTLYQVIANRPALLDCAFFGSPLPTIEWFKGAKGSALHEDIYVLHENGTLEIPVAQKDSTGTYTCVARNKLGMAKNEVHLEIKDPTWIVKQPEYAVVQRGSMVSFECKVKHDHTLSLTVLWLKDNRELPSDERFTVDKDHLVVADVSDDDSGTYTCVANTTLDSVSASAVLSVVDVPNPPFDLELTDQLDKSVQLSWTPGDDNNSPITKFIIEYEDAMHKPGLWHHQTEVSGTQTTAQLKLSPYVNYSFRVMAVNSIGKSLPSEASEQYLTKASEPDKNPTAVEGLGSEPDNLVITWKPLNGFESNGPGLQYKVSWRQKDGDDEWTSVVVANVSKYIVSGTPTFVPYLIKVQALNDMGFAPEPAVVMGHSGEDLPMVAPGNVRVNVVNSTLAEVHWDPVPLKSIRGHLQGYRIYYWKTQSSSKRNRRHIEKKILTFQGSKTHGMLPGLEPFSHYTLNVRVVNGKGEGPASPDRVFNTPEGVPSAPSSLKIVNPTLDSLTLEWDPPSHPNGILTEYTLKYQPINSTHELGPLVDLKIPANKTRWTLKNLNFSTRYKFYFYAQTSAGSGSQITEEAVTTVDEAMASRQVDIATQGWFIGLMCAVALLILILLIVCFIRRNKGGKYPVKEKEDAHADPEIQPMKEDDGTFGEYSDAEDHKPLKKGSRTPSDRTVKKEDSDDSLVDYGEGVNGQFNEDGSFIGQYSGKKEKEPAEGNESSEAPSPVNAMNSFV

SEQ ID NO: 172 - protein, 731 aa, Homo sapiens
MWSWKCLLFWAVLVTATLCTARPSPTLPEQDALPSSEDDDDDDDSSSEEKETDNTKPNPVAPYWTSPEKMEKKLHAVPAAKTVKFKCPSSGTPNPTLRWLKNGKEFKPDHRIGGYKVRYATWSIIMDSVVPSDKGNYTCIVENEYGSINHTYQLDVVERSPHRPILQAGLPANKTVALGSNVEFMCKVYSDPQPHIQWLKHIEVNGSKIGPDNLPYVQILKTAGVNTTDKEMEVLHLRNVSFEDAGEYTCLAGNSIGLSHHSAWLTVLEALEERPAVMTSPLYLEIIIYCTGAFLISCMVGSVIVYKMKSGTKKSDFHSQMAVHKLAKSIPLRRQVTVSADSSASMNSGVLLVRPSRLSSSGTPMLAGVSEYELPEDPRWELPRDRLVLGKPLGEGCFGQVVLAEAIGLDKDKPNRVTKVAVKMLKSDATEKDLSDLISEMEMMKMIGKHKNIINLLGACTQDGPLYVIVEYASKGNLREYLQARRPPGLEYCYNPSHNPEEQLSSKDLVSCAYQVARGMEYLASKKCIHRDLAARNVLVTEDNVMKIADFGLARDIHHIDYYKKTTNGRLPVKWMAPEALFDRIYTHQSDVWSFGVLLWEIFTLGGSPYPGVPVEELFKLLKEGHRMDKPSNCTNELYMMMRDCWHAVPSQRPTFKQLVEDLDRIVALTSNQEYLDLSMPLDQYSPSFPDTRSSTCSSGEDSVFSHEPLPEEPCLPRHPAQLANGGLKRR

SEQ ID NO: 173 - protein, 457 aa, Homo sapiens
MRPPSPLPARWLCVLAGALAWALGPAGGQAARLQEECDYVQMIEVQHKQCLEEAQLENETIGCSKMWDNLTCWPATPRGQVVVLACPLIFKLFSSIQGRNVSRSCTDEGWTHLEPGPYPIACGLDDKAASLDEQQTMFYGSVKTGYTIGYGLSLATLLVATAILSLFRKLHCTRNYIHMHLFISFILRAAAVFIKDLALFDSGESDQCSEGSVGCKAAMVFFQYCVMANFFWLLVEGLYLYTLLAVSFFSERKYFWGYILIGWGVPSTFTMVWTIARIHFEDYGCWDTINSSLWWIIKGPILTSILVNFILFICIIRILLQKLRPPDIRKSDSSPYSRLARSTLLLIPLFGVHYIMFAFFPDNFKPEVKMVFELVVGSFQGFVVAILYCFLNGEVQAELRRKWRRWHLQGVLGWNPKYRHPSGGSNGATCSTQVSMLTRVSPGARRSSSFQAEVSLV

SEQ ID NO: 174 - protein, 554 aa, Homo sapiens
MTAPGAAGRCPPTTWLGSLLLLVCLLASRSITEEVSEYCSHMIGSGHLQSLQRLIDSQMETSCQITFEFVDQEQLKDPVCYLKKAFLLVQDIMEDTMRFRDNTPNAIAIVQLQELSLRLKSCFTKDYEEHDKACVRTFYETPLQLLEKVKNVFNETKNLLDKDWNIFSKNCNNSFAECSSQDVVTKPDCNCLYPKAIPSSDPASVSPHQPLAPSMAPVAGLTWEDSEGTEGSSLLPGEQPLHTVDPGSAKQRPPRSTCQSFEPPETPVVKDSTIGGSPQPRPSVGAFNPGMEDILDSAMGTNWVPEEASGEASEIPVPQGTELSPSRPGGGSMQTEPARPSNFLSASSPLPASAKGQQPADVTGTALPRVGPVRPTGQDWNHTPQKTDHPSALLRDPPEPGSPRISSLRPQGLSNPSTLSAQPQLSRSHSSGSVLPLGELEGRRSTRDRRSPAEPEGGPASEGAARPLPRFNSVPLTDTGHERQSEGSFSPQLQESVFHLLVPSVILVLLAVGGLLFYRWRRRSHQEPQRADSPLEQPEGSPLTQDDRQVELPV

SEQ ID NO: 175 - protein, 232 aa, Homo sapiens
MERCPSLGVTLYALVVVLGLRATPAGGQHYLHIRPAPSDNLPLVDLIEHPDPIFDPKEKDLNETLLRSLLGGHYDPGFMATSPPEDRPGGGGGAAGGAEDLAELDQLLRQRPSGAMPSEIKGLEFSEGLAQGKKQRLSKKLRRKLQMWLWSQTFCPVLYAWNDLGSRFWPRYVKVGSCFSKRSCSVPEGMVCKPSKSVHLTVLRWRCQRRGGQRCGWIPIQYPIISECKCSC

SEQ ID NO: 176 - protein, 255 aa, Homo sapiens
MAQHGAMGAFRALCGLALLCALSLGQRPTGGPGCGPGRLLLGTGTDARCCRVHTTRCCRDYPGEECCSEWDCMCVQPEFHCGDPCCTTCRHHPCPPGQGVQSQGKFSFGFQCIDCASGTFSGGHEGHCKPWTDCCWRCRRRPKTPEAASSPRKSGASDRQRRRGGWETCGCEPGRPPGPPTAASPSPGAPQAAGALRSALGRALLPWQQKWVQEGGSDQRPGPCSSAAAAGPCRRERETQSWPPSSLAGPDGVGS

SEQ ID NO: 177 - protein, 692 aa, Homo sapiens
MELLPLWLCLGFHFLTVGWRNRSGTATAASQGVCKLVGGAADCRGQSLASVPSSLPPHARMLTLDANPLKTLWNHSLQPYPLLESLSLHSCHLERISRGAFQEQGHLRSLVLGDNCLSENYEETAAALHALPGLRRLDLSGNALTEDMAALMLQNLSSLRSVSLAGNTIMRLDDSVFEGLERLRELDLQRNYIFEIEGGAFDGLAELRHLNLAFNNLPCIVDFGLTRLRVLNVSYNVLEWFLATGGEAAFELETLDLSHNQLLFFPLLPQYSKLRTLLLRDNNMGFYRDLYNTSSPREMVAQFLLVDGNVTNITTVSLWEEFSSSDLADLRFLDMSQNQFQYLPDGFLRKMPSLSHLNLHQNCLMTLHIREHEPPGALTELDLSHNQLSELHLAPGLASCLGSLRLFNLSSNQLLGVPPGLFANARNITTLDMSHNQISLCPLPAASDRVGPPSCVDFRNMASLRSLSLEGCGLGALPDCPFQGTSLTYLDLSSNWGVLNGSLAPLQDVAPMLQVLSLRNMGLHSSFMALDFSGFGNLRDLDLSGNCLTTFPRFGGSLALETLDLRRNSLTALPQKAVSEQLSRGLRTIYLSQNPYDCCGVDGWGALQHGQTVADWAMVTCNLSSKIIRVTELPGGVPRDCKWERLDLGLLYLVLILPSCLTLLVACTVIVLTFKKPLLQVIKSRCHWSSVY

SEQ ID NO: 178 - protein, 652 aa, Homo sapiens
MPLLLLLLLLPSPLHPHPICEVSKVASHLEVNCDKRNLTALPPDLPKDTTILHLSENLLYTFSLATLMPYTRLTQLNLDRCELTKLQVDGTLPVLGTLDLSHNQLQSLPLLGQTLPALTVLDVSFNRLTSLPLGALRGLGELQELYLKGNELKTLPPGLLTPTPKLEKLSLANNNLTELPAGLLNGLENLDTLLLQENSLYTIPKGFFGSHLLPFAFLHGNPWLCNCEILYFRRWLQDNAENVYVWKQGVDVKAMTSNVASVQCDNSDKFPVYKYPGKGCPTLGDEGDTDLYDYYPEEDTEGDKVRATRTVVKFPTKAHTTPWGLFYSWSTASLDSQMPSSLHPTQESTKEQTTFPPRWTPNFTLHMESITFSKTPKSTTEPTPSPTTSEPVPEPAPNMTTLEPTPSPTTPEPTSEPAPSPTTPEPTSEPAPSPTTPEPTSEPAPSPTTPEPTPIPTIATSPTILVSATSLITPKSTFLTTTKPVSLLESTKKTIPELDQPPKLRGVLQGHLESSRNDPFLHPDFCCLLPLGFYVLGLFWLLFASVVLILLLSWVGHVKPQALDSGQGAALTTATQTTHLELQRGRQVTVPRAWLLFLRGSLPTFRSSLFLWVRPNGRVGPLVAGRRPSALSQGRGQDLLSTVSIRYSGHSL

SEQ ID NO: 179 - protein, 179 aa, Homo sapiens
MAALQKSVSSFLMGTLATSCLLLLALLVQGGAAAPISSHCRLDKSNFQQPYITNRTFMLAKEASLADNNTDVRLIGEKLFHGVSMSERCYLMKQVLNFTLEEVLFPQSDRFQPYMQEVVPFLARLSNRLSTCHIEGDDLHIQRNVQKLKDTVKKLGESGEIKAIGELDLLFMSLRNACI

SEQ ID NO: 180 - protein, 1452 aa, Homo sapiens
MRGLGTCLATLAGLLLTAAGETFSGGCLFDEPYSTCGYSQSEGDDFNWEQVNTLTKPTSDPWMPSGSFMLVNASGRPEGQRAHLLLPQLKENDTHCIDFHYFVSSKSNSPPGLLNVYVKVNNGPLGNPIWNISGDPTRTWNRAELAISTFWPNFYQVIFEVITSGHQGYLAIDEVKVLGHPCTRTPHFLRIQNVEVNAGQFATFQCSAIGRTVAGDRLWLQGIDVRDAPLKEIKVTSSRRFIASFNVVNTTKRDAGKYRCMIRTEGGVGISNYAELVVKEPPVPIAPPQLASVGATYLWIQLNANSINGDGPIVAREVEYCTASGSWNDRQPVDSTSYKIGHLDPDTEYEISVLLTRPGEGGTGSPGPALRTRTKCADPMRGPRKLEVVEVKSRQITIRWEPFGYNVTRCHSYNLTVHYCYQVGGQEQVREEVSWDTENSHPQHTITNLSPYTNVSVKLILMNPEGRKESQELIVQTDEDLPGAVPTESIQGSTFEEKIFLQWREPTQTYGVITLYEITYKAVSSFDPEIDLSNQSGRVSKLGNETHFLFFGLYPGTTYSFTIRASTAKGFGPPATNQFTTKISAPSMPAYELETPLNQTDNTVTVMLKPAHSRGAPVSVYQIVVEEERPRRTKKTTEILKCYPVPIHFQNASLLNSQYYFAAEFPADSLQAAQPFTIGDNKTYNGYWNTPLLPYKSYRIYFQAASRANGETKIDCVQVATKGAATPKPVPEPEKQTDHTVKIAGVIAGILLFVIIFLGVVLVMKKRKLAKKRKETMSSTRQEMTVMVNSMDKSYAEQGTNCDEAFSFMDTHNLNGRSVSSPSSFTMKTNTLSTSVPNSYYPDETHTMASDTSSLVQSHTYKKREPADVPYQTGQLHPAIRVADLLQHITQMKCAEGYGFKEEYESFFEGQSAPWDSAKKDENRMKNRYGNIIAYDHSRVRLQTIEGDTNSDYINGNYIDGYHRPNHYIATQGPMQETIYDFWRMVWHENTASIIMVTNLVEVGRVKCCKYWPDDTEIYKDIKVTLIETELLAEYVIRTFAVEKRGVHEIREIRQFHFTGWPDHGVPYHATGLLGFVRQVKSKSPPSAGPLVVHCSAGAGRTGCFIVIDIMLDMAEREGVVDIYNCVRELRSRRVNMVQTEEQYVFIHDAILEACLCGDTSVPASQVRSLYYDMNKLDPQTNSSQIKEEFRTLNMVTPTLRVEDCSIALLPRNHEKNRCMDILPPDRCLPFLITIDGESSNYINAALMDSYKQPSAFIVTQHPLPNTVKDFWRLVLDYHCTSVVMLNDVDPAQLCPQYWPENGVHRHGPIQVEFVSADLEEDIISRIFRIYNAARPQDGYRMVQQFQFLGWPMYRDTPVSKRSFLKLIRQVDKWQEEYNGGEGRTVVHCLNGGGRSGTFCAISIVCEMLRHQRTVDVFHAVKTLRNNKPNMVDLLDQYKFCYEVALEYLNSG

SEQ ID NO: 181 - protein, 329 aa, Homo sapiens
MDPQCTMGLSNILFVMAFLLSGAAPLKIQAYFNETADLPCQFANSQNQSLSELVVFWQDQENLVLNEVYLGKEKFDSVHSKYMGRTSFDSDSWTLRLHNLQIKDKGLYQCIIHHKKPTGMIRIHQMNSELSVLANFSQPEIVPISNITENVYINLTCSSIHGYPEPKKMSVLLRTKNSTIEYDGVMQKSQDNVTELYDVSISLSVSFPDVTSNMTIFCILETDKTRLLSSPFSIELEDPQPPPDHIPWITAVLPTVIICVMVFCLILWKWKKKKRPRNSYKCGTNTMEREESEQTKKREKIHIPERSDEAQRVFKSSKTSSCDKSDTCF

SEQ ID NO: 182 - protein, 253 aa, Homo sapiens
MHSWERLAVLVLLGAAACAAPPRGRILGGREAEAHARPYMASVQLNGAHLCGGVLVAEQWVLSAAHCLEDAADGKVQVLLGAHSLSQPEPSKRLYDVLRAVPHPDSQPDTIDHDLLLLQLSEKATLGPAVRPLPWQRVDRDVAPGTLCDVAGWGIVNHAGRRPDSLQHVLLPVLDRATCNRRTHHDGAITERLMCAESNRRDSCKGDSGGPLVCGGVLEGVVTSGSRVCGNRKKPGIYTRVASYAAWIDSVLA

SEQ ID NO: 183 - protein, 958 aa, Homo sapiens [sequence omitted]

SEQ ID NO: 184 - protein, 165 aa, Homo sapiens
MAKMNLSSYILILTFSLFSQGILLSASKSIRNLDDDMVFNTFRLGKGFQKEDTAEKSVIAPSLEQYKNDESSFMNEEENKVSKNTGSKHNFLNHGLPLNLAIKPYLALKGSVAFPAENGVQNTESTQEKREIGDEENSAKFPIGRRDFDMLRCMLGRVYRPCWQV

SEQ ID NO: 185 - protein, 955 aa, Homo sapiens
MWAGLLLRAACVALLLPGAPARGYTGRKPPGHFAAERRRLGPHVCLSGFGSGCCPGWAPSMGGGHCTLPLCSFGCGSGICIAPNVCSCQDGEQGATCPETHGPCGEYGCDLTCNHGGCQEVARVCPVGFSMTETAVGIRCTDIDECVTSSCEGHCVNTEGGFVCECGPGMQLSADRHSCQDTDECLGTPCQQRCKNSIGSYKCSCRTGFHLHGNRHSCVDVNECRRPLERRVCHHSCHNTVGSFLCTCRPGFRLRADRVSCEAFPKAVLAPSAILQPRQHPSKMLLLLPEAGRPALSPGHSPPSGAPGPPAGVRTTRLPSPTPRLPTSSPSAPVWLLSTLLATPVPTASLLGNLRPPSLLQGEVMGTPSSPRGPESPRLAAGPSPCWHLGAMHESRSRWTEPGCSQCWCEDGKVTCEKVRCEAACSHPIPSRDGGCCPSCTGCFHSGVVRAEGDVFSPPNENCTVCVCLAGNVSCISPECPSGPCQTPPQTDCCTCVPVRCYFHGRWYADGAVFSGGGDECTTCVCQNGEVECSFMPCPELACPREEWRLGPGQCCFTCQEPTPSTGCSLDDNGVEFPIGQIWSPGDPCELCICQADGSVSCKRTDCVDSCPHPIRIPGQCCPDCSAGCTYTGRIFYNNETFPSVLDPCLSCICLLGSVACSPVDCPITCTYPFHPDGECCPVCRDCNYEGRKVANGQVFTLDDEPCTRCTCQLGEVSCEKVPCQRACADPALLPGDCCSSCPDSLSPLEEKQGLSPHGNVAFSKAGRSLHGDTEAPVNCSSCPGPPTASPSRPVLHLLQLLLRTNLMKTQTLPTSPAGAHGPHSLALGLTATFPGEPGASPRLSPGPSTPPGAPTLPLASPGAPQPPPVTPERSFSASGAQIVSRWPPLPGTLLTEASALSMMDPSPSKTPITLLGPRVLSPTTSRLSTALAATTHPGPQQPPVGASRGEESTM

SEQ ID NO: 186 - protein, 346 aa, Homo sapiens
MAPRSLLLLLSGALALTDTWAGSHSLRYFSTAVSRPGRGEPRYIAVEYVDDTQFLRFDSDAAIPRMEPREPWVEQEGPQYWEWTTGYAKANAQTDRVALRNLLRRYNQSEAGSHTLQGMNGCDMGPDGRLLRGYHQHAYDGKDYISLNEDLRSWTAADTVAQITQRFYEAEEYAEEFRTYLEGECLELLRRYLENGKETLQRADPPKAHVAHHPISDHEATLRCWALGFYPAEITLTWQRDGEEQTQDTELVETRPAGDGTFQKWAAVVVPPGEEQRYTCHVQHEGLPQPLILRWEQSPQPTIPIVGIVAGLVVLGAVVTGAVVAAVMWRKKSSDRNRGSYSQAAV

SEQ ID NO: 187 - protein, 147 aa, Homo sapiens
MVMGLGVLLLVFVLGLGLTPPTLAQDNSRYTHFLTQHYDAKPQGRDDRYCESIMRRRGLTSPCKDINTFIHGNKRSIKAICENKNGNPHRENLRISKSSFQVTTCKLHGGSPWPPCQYRATAGFRNVVVACENGLPVHLDQSIFRRP

SEQ ID NO: 188 - protein, 163 aa, Homo sapiens
MTVKTLHGPAMVKYLLLSILGLAFLSEAAARKIPKVGHTFFQKPESCPPVPGGSMKLDIGIINENQRVSMSRNIESRSTSPWNYTVTWDPNRYPSEVVQAQCRNLGCINAQGKEDISMNSVPIQQETLVVRRKHQGCSVSFQLEKVLVTVGCTCVTPVIHHVQ

SEQ ID NO: 189 - protein, 669 aa, Homo sapiens
MVSWGRFICLVVVTMATLSLARPSFSLVEDTTLEPEDAISSGDDEDDTDGAEDFVSENSNNKRAPYWTNTEKMEKRLHAVPAANTVKFRCPAGGNPMPTMRWLKNGKEFKQEHRIGGYKVRNQHWSLIMESVVPSDKGNYTCVVENEYGSINHTYHLDVVERSPHRPILQAGLPANASTVVGGDVEFVCKVYSDAQPHIQWIKHVEKNGSKYGPDGLPYLKVLKAAGVNTTDKEIEVLYIRNVTFEDAGEYTCLAGNSIGISFHSAWLTVLPAPGREKEITASPDYLEIAIYCIGVFLIACMVVTVILCRMKNTTKKPDFSSQPAVHKLTKRIPLRRQVSAESSSSMNSNTPLVRITTRLSSTADTPMLAGVSEYELPEDPKWEFPRDKLTLGKPLGEGCFGQVVMAEAVGIDKDKPKEAVTVAVKMLKDDATEKDLSDLVSEMEMMKMIGKHKNIINLLGACTQDGPLYVIVEYASKGNLREYLRARRPPGMEYSYDINRVPEEQMTFKDLVSCTYQLARGMEYLASQKCIHRDLAARNVLVTENNVMKIADFGLARDINNIDYYKKTTNGRLPVKWMAPEALFDRVYTHQSDVWSFGVLMWEIFTLGGSPYPGIPVEELFKLLKEGHRMDKPANCTNELYMMMRDCWHAVPSQRPTFKQLVEDLDRI

SEQ ID NO: 190 - protein, 562 aa, Homo sapiens
MRLRLRLLALLLLLLAPPARAPKPSAQDVSLGVDWLTRYGYLPPPHPAQAQLQSPEKLRDAIKVMQRFAGLPETGRMDPGTVATMRKPRCSLPDVLGVAGLVRRRRRYALSGSVWKKRTLTWRVRSFPQSSQLSQETVRVLMSYALMAWGMESGLTFHEVDSPQGQEPDILIDFARAFHQDSYPFDGLGGTLAHAFFPGEHPISGDTHFDDEETWTFGSKDGEGTDLFAVAVHEFGHALGLGHSSAPNSIMRPFYQGPVGDPDKYRLSQDDRDGLQQLYGKAPQTPYDKPTRKPLAPPPQPPASPTHSPSFPIPDRCEGNFDAIANIRGETFFFKGPWFWRLQPSGQLVSPRPARLHRFWEGLPAQVRVVQAAYARHRDGRILLFSGPQFWVFQDRQLEGGARPLTELGLPPGEEVDAVFSWPQNGKTYLVRGRQYWRYDEAAARPDPGYPRDLSLWEGAPPSPDDVTVSNAGDTYFFKGAHYWRFPKNSIKTEPDAPQPMGPNWLDCPAPSSGPRAPRPPKATPVSETCDCQCELNQAAGRWPAPIPLLLLPLLVGGVASR

SEQ ID NO: 191 - protein, 242 aa, Homo sapiens
MGPRARPALLLLMLLQTAVLQGRLLRSHSLHYLFMGASEQDLGLSLFEALGYVDDQLFVFYDHESRRVEPRTPWVSSRISSQMWLQLSQSLKGWDHMFTVDFWTIMENHNHSKVTTLRCRALNYYPQNITMKWLKDKQPMDAKEFEPKDVLPNGDGTYQGWITLAVPPGEEQRYTCQVEHPGLDQPLIVIWEPSPSGTLVIGVISGIAVFVVILFIGILFIILRKRQGSRGAMGHYVLAERE

SEQ ID NO: 192 - protein, 443 aa, Homo sapiens
MDFPCLWLGLLLPLVAALDFNYHRQEGMEAFLKTVAQNYSSVTHLHSIGKSVKGRNLWVLVVGRFPKEHRIGIPEFKYVANMHGDETVGRELLLHLIDYLVTSDGKDPEITNLINSTRIHIMPSMNPDGFEAVKKPDCYYSIGRENYNQYDLNRNFPDAFEYNNVSRQPETVAVMKWLKTETFVLSANLHGGALVASYPFDNGVQATGALYSRSLTPDDDVFQYLAHTYASRNPNMKKGDECKNKMNFPNGVTNGYSWYPLQGGMQDYNYIWAQCFEITLELSCCKYPREEKLPSFWNNNKASLIEYIKQVHLGVKGQVFDQNGNPLPNVIVEVQDRKHICPYRTNKYGEYYLLLLPGSYIINVTVPGHDPHITKVIIPEKSQNFSALKKDILLPFQGQLDSIPVSNPSCPMIPLYRNLPDHSAATKPSLFLFLVSLLHIFFK

SEQ ID NO: 193 - protein, 287 aa, Homo sapiens
MSSTLPALLCVGLCLSQRISAQQQTLPKPFIWAEPHFMVPKEKQVTICCQGNYGAVEYQLHFEGSLFAVDRPKPPERINKVQFYIPDMNSRMAGQYSCIYRVGELWSEPSNLLDLVVTEMYDTPTLSVHPGPEVISGEKVTFYCRLDTATSMFLLLKEGRSSHVQRGYGKVQAEFPLGPVTTAHRGTYRCFGSYNNHAWSFPSEPVKLLVTGDIENTSLAPEDPTFPDHALWDHTAQNLLRMGLAFLVLVALVWFLVEDWLSRKRTRERASRASTWEGRRRLNTQTL

SEQ ID NO: 194 - protein, 550 aa, Homo sapiens
MPPPRTGRGLLWLGLVLSSVCVALGSETQANSTTDALNVLLIIVDDLRPSLGCYGDKLVRSPNIDQLASHSLLFQNAFAQQAVCAPSRVSFLTGRRPDTTRLYDFNSYWRVHAGNFSTIPQYFKENGYVTMSVGKVFHPGISSNHTDDSPYSWSFPPYHPSSEKYENTKTCRGPDGELHANLLCPVDVLDVPEGTLPDKQSTEQAIQLLEKMKTSASPFFLAVGYHKPHIPFRYPKEFQKLYPLENITLAPDPEVPDGLPPVAYNPWMDIRQREDVQALNISVPYGPIPVDFQRKIRQSYFASVSYLDTQVGRLLSALDDLQLANSTIIAFTSDHGWALGEHGEWAKYSNFDVATHVPLIFYVPGRTASLPEAGEKLFPYLDPFDSASQLMEPGRQSMDLVELVSLFPTLAGLAGLQVPPRCPVPSFHVELCREGKNLLKHFRFRDLEEDPYLPGNPRELIAYSQYPRPSDIPQWNSDKPSLKDIKIMGYSIRTIDYRYTVWVGFNPDEFLANFSDIHAGELYFVDSDPLQDHNMYNDSQGGDLFQLLMP

SEQ ID NO: 195 - protein, 365 aa, Homo sapiens [sequence omitted]

SEQ ID NO: 196 - protein, 367 aa, Homo sapiens
MWSWKCLLFWAVLVTATLCTARPSPTLPEQAQPWGAPVEVESFLVHPGDLLQLRCRLRDDVQSINWLRDGVQLAESNRTRITGEEVEVQDSVPADSGLYACVTSSPSGSDTTYFSVNVSVPIDALPSSEDDDDDDDSSSEEKETDNTKPNPVAPYWTSPEKMEKKLHAVPAAKTVKFKCPSSGTPNPTLRWLKNGKEFKPDHRIGGYKVRYATWSIIMDSVVPSDKGNYTCIVENEYGSINHTYQLDVVERSPHRPILQAGLPANKTVALGSNVEFMCKVYSDPQPHIQWLKHIEVNGSKIGPDNLPYVQILKHSGINSSDAEVLTLFNVTEAQSGEYVCKVSNYIGEANQSAWLTVTRPVAKDCWS

SEQ ID NO: 197 - protein, 397 aa, Homo sapiens
MLLWTAVLLFVPCVGKTVWLYLQAWPNPVFEGDALTLRCQGWKNTPLSQVKFYRDGKFLHFSKENQTLSMGAATVQSRGQYSCSGQVMYIPQTFTQTSETAMVQVQELFPPPVLSAIPSPEPREGSLVTLRCQTKLHPLRSALRLLFSFHKDGHTLQDRGPHPELCIPGAKEGDSGLYWCEVAPEGGQVQKQSPQLEVRVQAPVSRPVLTLHHGPADPAVGDMVQLLCEAQRGSPPILYSFYLDEKIVGNHSAPCGGTTSLLFPVKSEQDAGNYSCEAENSVSRERSEPKKLSLKGSQVLFTPASNWLVPWLPASLLGLMVIAAALLVYVRSWRKAGPLPSQIPPTAPGGEQCPLYANVHHQKGKDEGVVYSVVHRTSKRSEGQFYHLCGGEMPAAQ

SEQ ID NO: 198 - protein, 2458 aa, Homo sapiens
MVLLLCLSCLIFSCLTFSWLKIWGKMTDSKPITKSKSEANLIPSQEPFPASDNSGETPQRNGEGHTLPKTPSQAEPASHKGPKDAGRRRNSLPPSHQKPPRNPLSSSDAAPSPELQANGTGTQGLEATDTNGLSSSARPQGQQAGSPSKEDKKQANIKRQLMTNFILGSFDDYSSDEDSVAGSSRESTRKGSRASLGALSLEAYLTTGEAETRVPTMRPSMSGLHLVKRGREHKKLDLHRDFTVASPAEFVTRFGGDRVIEKVLIANNGIAAVKCMRSIRRWAYEMFRNERAIRFVVMVTPEDLKANAEYIKMADHYVPVPGGPNNNNYANVELIVDIAKRIPVQAVWAGWGHASENPKLPELLCKNGVAFLGPPSEAMWALGDKIASTVVAQTLQVPTLPWSGSGLTVEWTEDDLQQGKRISVPEDVYDKGCVKDVDEGLEAAERIGFPLMIKASEGGGGKGIRKAESAEDFPILFRQVQSEIPGSPIFLMKLAQHARHLEVQILADQYGNAVSLFGRDCSIQRRHQKIVEEAPATIAPLAIFEFMEQCAIRLAKTVGYVSAGTVEYLYSQDGSFHFLELNPRLQVEHPCTEMIADVNLPAAQLQIAMGVPLHRLKDIRLLYGESPWGVTPISFETPSNPPLARGHVIAARITSENPDEGFKPSSGTVQELNFRSSKNVWGYFSVAATGGLHEFADSQFGHCFSWGENREEAISNMVVALKELSIRGDFRTTVEYLINLLETESFQNNDIDTGWLDYLIAEKVQAEKPDIMLGVVCGALNVADAMFRTCMTDFLHSLERGQVLPADSLLNLVDVELIYGGVKYILKVARQSLTMFVLIMNGCHIEIDAHRLNDGGLLLSYNGNSYTTYMKEEVDSYRITIGNKTCVFEKENDPTVLRSPSAGKLTQYTVEDGGHVEAGSSYAEMEVMKMIMTLNVQERGRVKYIKRPGAVLEAGCVVARLELDDPSKVHPAEPFTGELPAQQTLPILGEKLHQVFHSVLENLTNVMSGFCLPEPVFSIKLKEWVQKLMMTLRHPSLPLLELQEIMTSVAGRIPAPVEKSVRRVMAQYASNITSVLCQFPSQQIATILDCHAATLQRKADREVFFINTQSIVQLVQRYRSGIRGYMKTVVLDLLRRYLRVEHHFQQAHYDKCVINLREQFKPDMSQVLDCIFSHAQVAKKNQLVIMLIDELCGPDPSLSDELISILNELTQLSKSEHCKVALRARQILIASHLPSYELRHNQVESIFLSAIDMYGHQFCPENLKKLILSETTIFDVLPTFFYHANKVVCMASLEVYVRRGYIAYELNSLQHRQLPDGTCVVEFQFMLPSSHPNRMTVPISITNPDLLRHSTELFMDSGFSPLCQRMGAMVAFRRFEDFTRNFDEVISCFANVPKDTPLFSEARTSLYSEDDCKSLREEPIHILNVSIQCADHLEDEALVPILRTFVQSKKNILVDYGLRRITFLIAQEKEFPKFFTFRARDEFAEDRIYRHLEPALAFQLELNRMRNFDLTAVPCANHKMHLYLGAAKVKEGVEVTDHRFFIRAIIRHSDLITKEASFEYLQNEGERLLLEAMDELEVAFNNTSVRTDCNHIFLNFVPTVIMDPFKIEESVRYMVMRYGSRLWKLRVLQAEVKINIRQTTTGSAVPIRLFITNESGYYLDISLYKEVTDSRSGNIMFHSFGNKQGPQHGMLINTPYVTKDLLQAKRFQAQTLGTTYIYDFPEMFRQALFKLWGSPDKYPKDILTYTELVLDSQGQLVEMNRLPGGNEVGMVAFKMRFKTQEYPEGRDVIVIGNDITFRIGSFGPGEDLLYLRASEMARAEGIPKIYVAANSGARIGMAEEIKHMFHVAWVDPEDPHKGFKYLYLTPQDYTRISSLNSVHCKHIEEGGESRYMITDIIGKDDGLGVENLRGSGMIAGESSLAYEEIVTISLVTCRAIGIGAYLVRLGQRVIQVENSHIILTGASALNKVLGREVYTSNNQLGGVQIMHYNGVSHITVPDDFEGVYTILEWLSYMPKDNHSPVPIITPTDPIDREIEFLPSRAPYDPRWMLAGRPHPTLKGTWQSGFFDHGSFKEIMAPWAQTVVTGRARLGGIPVGVIAVETRTVEVAVPADPANLDSEAKIIQQAGQVWFPDSAYKTAQAVKDFNREKLPLMIFANWRGFSGGMKDMYDQVLKFGAYIVDGLRQYKQPILIYIPPYAELRGGSWVVIDATINPLCIEMYADKESRGGVLEPEGTVEIKFRKKDLIKSMRRIDPAYKKLMEQLGEPDLSDKDRKDLEGRLKAREDLLLPIYHQVAVQFADFHDTPGRMLEKGVISDILEWKTARTFLYWRLRRLLLEDQVKQEILQASGELSHVHIQSMLRRWFVETEGAVKAYLWDNNQVVVQWLEQHWQAGDGPRSTIRENITYLKHDSVLKTIRGLVEENPEVAVDCVIYLSQHISPAERAQVVHLLSTMDSPAST

SEQ ID NO: 199 - protein, 973 aa, Homo sapiens
MSPVRRWGSPCLFPLQLFSLCWVLSVAQSKTVRYSTFEEDAPGTVIGTLAEDLHMKVSGDTSFRLMKQFNSSLLRVREGDGQLTVGDAGLDRERLCGQAPQCVLAFDVVSFSQEQFRLVHVEVEVRDVNDHAPRFPRAQIPVEVSEGAAVGTRIPLEVPVDEDVGANGLQTVRLAEPHSPFRVELQTRADGAQCADLVLLQELDRESQAAYSLELVAQDGGRPPRSATAALSVRVLDANDHSPAFPQGAVAEVELAEDAPVGSLLLDLDAADPDEGPNGDVVFAFGARTPPEARRLFRLDPRSGRLTLAGPVDYERQDTYELDVRAQDRGPGPRAATCKVIVRIRDVNDNAPDIAITPLAAPGAPATSPFAAAAAAAALGGADASSPAGAGTPEAGATSLVPEGAARESLVALVSTSDRDSGANGQVRCALYGHEHFRLQPAYAGSYLVVTAASLDRERIAEYNLTLVAEDRGAPPLRTVRPYTVRVGDENDNAPLFTRPVYEVSVRENNPPGAYLATVAARDRDLGRNGQVTYRLLEAEVGRAGGAVSTYVSVDPATGAIYALRSFDYETLRQLDVRIQASDGGSPQLSSSALVQVRVLDQNDHAPVLVHPAPANGSLEVAVPGRTAKDTVVARVQARDADEGANGELAFELQQQEPREAFAIGRRTGEILLTGDLSQEPPGRVFRALLVISDGGRPPLTTTATVSFVVTAGGGRGPAAPASAGSPERSRPPGSRLGVSGSVLQWDTPLIVIIVLAGSCTLLLAAIIAIATTCNRRKKEPYGASPGFGKEPAPPVAVWKGHSFNTISGREAEKFSGKDSGKGDSDFNDSDSDISGDALKKDLINHMQSGLWACTAECKILGHSDRCWSPSCSGPNAHPSPHPPAQMSTFCKSTSLPRDPLRRDNYYQAQLPKTVGLQSVYEKVLHRDYDRTVTLLSPPRPGRLPDLQEIGVPLYQSPPGRYLSPKKGANENV

SEQ ID NO: 200 - protein, 454 aa, Homo sapiens
MTWRAAASTCAALLILLWALTTEGDLKVEMMAGGTQITPLNDNVTIFCNIFYSQPLNITSMGITWFWKSLTFDKEVKVFEFFGDHQEAFRPGAIVSPWRLKSGDASLRLPGIQLEEAGEYRCEVVVTPLKAQGTVQLEVVASPASRLLLDQVGMKENEDKYMCESSGFYPEAINITWEKQTQKFPHPIEISEDVITGPTIKNMDGTFNVTSCLKLNSSQEDPGTVYQCVVRHASLHTPLRSNFTLTAARHSLSETEKTDNFSIHWWPISFIGVGLVLLIVLIPWKKICNKSSSAYTPLKCILKHWNSFDTQTLKKEHLIFFCTRAWPSYQLQDGEAWPPEGSVNINTIQQLDVFCRQEGKWSEVPYVQAFFALRDNPDLCQCCRIDPALLTVTSGKSIDDNSTKSEKQTPREHSDAVPDAPILPVSPIWEPPPATTSTTPVLSSQPPTLLLPLQ

SEQ ID NO: 201 - protein, 272 aa, Homo sapiens
MGSLFPLSLLFFLAAAYPGVGSALGRRTKRAQSPKGSPLAPSGTSVPFWVRMSPEFVAVQPGKSVQLNCSNSCPQPQNSSLRTPLRQGKTLRGPGWVSYQLLDVRAWSSLAHCLVTCAGKTRWATSRITAYSVPGGLLGGDPEAWKPGHLFRKPGALHRPGSGQRDLDLRVCCWTPRLLAARDLPRAPQSRRPGGPQQLGTHYTDARLEPRAHSFGLRFHRCPCRDPPHCGRCVPMQVPSYEVPGVKGDVLCRLSEKKRNMKQSGEMAIHGG

SEQ ID NO: 202 - protein, 715 aa, Homo sapiens
MVPGARGGGALARAAGRGLLALLLAVSAPLRLQAEELGDGCGHLVTYQDSGTMTSKNYPGTYPNHTVCEKTITVPKGKRLILRLGDLDIESQTCASDYLLFTSSSDQYGPYCGSMTVPKELLLNTSEVTVRFESGSHISGRGFLLTYASSDHPDLITCLERASHYLKTEYSKFCPAGCRDVAGDISGNMVDGYRDTSLLCKAAIHAGIIADELGGQISVLQRKGISRYEGILANGVLSRDGSLSDKRFLFTSNGCSRSLSFEPDGQIRASSSWQSVNESGDQVHWSPGQARLQDQGPSWASGDSSNNHKPREWLEIDLGEKKKITGIRTTGSTQSNFNFYVKSFVMNFKNNNSKWKTYKGIVNNEEKVFQGNSNFRDPVQNNFIPPIVARYVRVVPQTWHQRIALKVELIGCQITQGNDSLVWRKTSQSTSVSTKKEDETITRPIPSEETSTGINITTVAIPLVLLVVLVFAGMGIFAAFRKKKKKGSPYGSAEAQKTDCWKQIKYPFARHQSAEFTISYDNEKEMTQKLDLITSDMADYQQPLMIGTGTVTRKGSTFRPMDTDAEEAGVSTDAGGHYDCPQRAGRHEYALPLAPPEPEYATPIVERHVLRAHTFSAQSGYRVPGPQPGHKHSLSSGGFSPVAGVGAQDGDYQRPHSAQPADRGYDRPKAVSALATESGHPDSQKPPTHPGTSDSYSAPRDCLTPLNQTAMTALL

SEQ ID NO: 203 - protein, 326 aa, Homo sapiens
MREWWVQVGLLAVPLLAAYLHIPPPQLSPALHSWKSSGKFFTYKGLRIFYQDSVGVVGSPEIVVLLHGFPTSSYDWYKIWEGLTLRFHRVIALDFLGFGFSDKPRPHHYSIFEQASIVEALLRHLGLQNRRINLLSHDYGDIVAQELLYRYKQNRSGRLTIKSLCLSNGGIFPETHRPLLLQKLLKDGGVLSPILTRLMNFFVFSRGLTPVFGPYTRPSESELWDMWAGIRNNDGNLVIDSLLQYINQRKKFRRRWVGALASVTIPIHFIYGPLDPVNPYPEFLELYRKTLPRSTVSILDDHISHYPQLEDPMGFLNAYMGFINSF

SEQ ID NO: 204 - protein, 170 aa, Homo sapiens
MPVPASWPHPPGPFLLLTLLLGLTEVAGEEELQMIQPEKLLLVTVGKTATLHCTVTSLLPVGPVLWFRGVGPGRELIYNQKEGHFPRVTTVSDLTKRNNMDFSIRISSITPADVGTYYCVKFRKGSPENVEFKSGPGTEMALGGPASSLTALLLIAVLLGPIYVPWKQKT

SEQ ID NO: 205 - protein, 209 aa, Homo sapiens
MSSTLPALLCVGLCLSQRISAQQQMYDTPTLSVHPGPEVISGEKVTFYCRLDTATSMFLLLKEGRSSHVQRGYGKVQAEFPLGPVTTAHRGTYRCFGSYNNHAWSFPSEPVKLLVTGDIENTSLAPEDPTFPADTWGTYLLTTETGLQKDHALWDHTAQNLLRMGLAFLVLVALVWFLVEDWLSRKRTRERASRASTWEGRRRLNTQTL

SEQ ID NO: 206 - protein, 361 aa, Homo sapiens
MAGGRHRRVVGTLHLLLLVAALPWASRGVSPSASAWPEEKNYHQPAILNSSALRQIAEGTSISEMWQNDLQPLLIERYPGSPGSYAARQHIMQRIQRLQADWVLEIDTFLSQTPYGYRSFSNIISTLNPTAKRHLVLACHYDSKYFSHWNNRVFVGATDSAVPCAMMLELARALDKKLLSLKTVSDSKPDLSLQLIFFDGEEAFLHWSPQDSLYGSRHLAAKMASTPHPPGARGTSQLHGMDLLVLLDLIGAPNPTFPNFFPNSARWFERLQAIEHELHELGLLKDHSLEGRYFQNYSYGGVIQDDHIPFLRRGVPVLHLIPSPFPEVWHTMDDNEENLDESTIDNLNKILQVFVLEYLHL

SEQ ID NO: 207 - protein, 352 aa, Homo sapiens
MARMGLAGAAGRWWGLALGLTAFFLPGVHSQVVQVNDSMYGFIGTDVVLHCSFANPLPSVKITQVTWQKSTNGSKQNVAIYNPSMGVSVLAPYRERVEFLRPSFTDGTIRLSRLELEDEGVYICEFATFPTGNRESQLNLTVMAKPTNWIEGTQAVLRAKKGQDDKVLVATCTSANGKPPSVVSWETRLKGEAEYQEIRNPNGTVTVISRYRLVPSREAHQQSLACIVNYHMDRFKESLTLNVQYEPEVTIEGFDGNWYLQRMDVKLTCKADANPPATEYHWTTLNGSLPKGVEAQNRTLFFKGPINYSLAGTYICEATNPIGTRSGQVEVNITAFCQLIYPGKGRTRARMF

SEQ ID NO: 208 - protein, 605 aa, Homo sapiens
MGRLLRAARLPPLLSPLLLLLVGGAFLGACVAGSDEPGPEGLTSTSLLDLLLPTGLEPLDSEEPSETMGLGAGLGAPGSGFPSEENEESRILQPPQYFWEEEEELNDSSLDLGPTADYVFPDLTEKAGSIEDTSQAQELPNLPSPLPKMNLVEPPWHMPPREEEEEEEEEEEREKEEVEKQEEEEEEELLPVNGSQEEAKPQVRDFSLTSSSQTPGATKSRHEDSGDQASSGVEVESSMGPSLLLPSVTPTTVTPGDQDSTSQEAEATVLPAAGLGVEFEAPQEASEEATAGAAGLSGQHEEVPALPSFPQTTAPSGAEHPDEDPLGSRTSASSPLAPGDMELTPSSATLGQEDLNQQLLEGQAAEAQSRIPWDSTQVICKDWSNLAGKNYIILNMTENIDCEVFRQHRGPQLLALVEEVLPRHGSGHHGAWHISLSKPSEKEQHLLMTLVGEQGVVPTQDVLSMLGDIRRSLEEIGIQNYSTTSSCQARASQVRSDYGTLFVVLVVIGAICIIIIALGLLYNCWQRRLPKLKHVSHGEELRFVENGCHDNPTLDVASDSQSEMQEKHPSLNGGGALNGPGSWGALMGGKRDPEDSDVFEEDTHL

SEQ ID NO: 209 - protein, 211 aa, Homo sapiens [sequence omitted]

SEQ ID NO: 210 - protein, 803 aa, Homo sapiens
MGCWGQLLVWFGAAGAILCSSPGSQETFLRSSPLPLASPSPRDPKVSAPPSILEPASPLNSPGTEGSWLFSTCGASGRHGPTQTQCDGAYAGTSVVVTVGAAGQLRGVQLWRVPGPGQYLISAYGAAGGKGAKNHLSRAHGVFVSAIFSLGLGESLYILVGQQGEDACPGGSPESQLVCLGESRAVEEHAAMDGSEGVPGSRRWAGGGGGGGGATYVFRVRAGELEPLLVAAGGGGRAYLRPRDRGRTQASPEKLENRSEAPGSGGRGGAAGGDASETDNLWADGEDGVSFIHPSSELFLQPLAVTENHGEVEIRRHLNCSHCPLRDCQWQAELQLAECLCPEGMELAVDNVTCMDLHKPPGPLVLMVAVVATSTLSLLMVCGVLILVKQKKWQGLQEMRLPSPELELSKLRTSAIRTAPNPYYCQVGLGPAQSWPLPPGVTEVSPANVTLLRALGHGAFGEVYEGLVIGLPGDSSPLQVAIKTLPELCSPQDELDFLMEALIISKFRHQNIVRCVGLSLRATPRLILLELMSGGDMKSFLRHSRPHLGQPSPLVMRDLLQLAQDIAQGCHYLEENHFIHRDIAARNCLLSCAGPSRVAKIGDFGMARDIYRASYYRRGDRALLPVKWMPPEAFLEGIFTSKTDSWSFGVLLWEIFSLGYMPYPGRTNQEVLDFVVGGGRMDPPRGCPGPVYRIMTQCWQHEPELRPSFASILERLQYCTQDPDVLNSLLPMELGPTPEEEGTSGLGNRSLECLRPPQPQELSPEKLKSWGGSPLGPWLSSGLKPLKSRGLQPQNLWNPTYRS

SEQ ID NO: 211 - protein, 1519 aa, Homo sapiens
MAPYPCGCHILLLLFCCLAAARANLLNLNWLWFNNEDTSHAATTIPEPQGPLPVQPTADTTTHVTPRNGSTEPATAPGSPEPPSELLEDGQDTPTSAESPDAPEENIAGVGAEILNVAKGIRSFVQLWNDTVPTESLARAETLVLETPVGPLALAGPSSTPQENGTTLWPSRGIPSSPGAHTTEAGTLPAPTPSPPSLGRPWAPLTGPSVPPPSSERISEEVGLLQLLGDPPPQQVTQTDDPDVGLAYVFGPDANSGQVARYHFPSLFFRDFSLLFHIRPATEGPGVLFAITDSAQAMVLLGVKLSGVQDGHQDISLLYTEPGAGQTHTAASFRLPAFVGQWTHLALSVAGGFVALYVDCEEFQRMPLARSSRGLELEPGAGLFVAQAGGADPDKFQGVIAELKVRRDPQVSPMHCLDEEGDDSDGASGDSGSGLGDARELLREETGAALKPRLPAPPPVTTPPLAGGSSTEDSRSEEVEEQTTVASLGAQTLPGSDSVSTWDGSVRTPGGRVKEGGLKGQKGEPGVPGPPGRAGPPGSPCLPGPPGLPCPVSPLGPAGPALQTVPGPQGPPGPPGRDGTPGRDGEPGDPGEDGKPGDTGPQGFPGTPGDVGPKGDKGDPGVGERGPPGPQGPPGPPGPSFRHDKLTFIDMEGSGFGGDLEALRGPRGFPGPPGPPGVPGLPGEPGRFGVNSSDVPGPAGLPGVPGREGPPGFPGLPGPPGPPGREGPPGRTGQKGSLGEAGAPGHKGSKGAPGPAGARGESGLAGAPGPAGPPGPPGPPGPPGPGLPAGFDDMEGSGGPFWSTARSADGPQGPPGLPGLKGDPGVPGLPGAKGEVGADGVPGFPGLPGREGIAGPQGPKGDRGSRGEKGDPGKDGVGQPGLPGPPGPPGPVVYVSEQDGSVLSVPGPEGRPGFAGFPGPAGPKGNLGSKGERGSPGPKGEKGEPGSIFSPDGGALGPAQKGAKGEPGFRGPPGPYGRPGYKGEIGFPGRPGRPGMNGLKGEKGEPGDASLGFGMRGMPGPPGPPGPPGPPGTPVYDSNVFAESSRPGPPGLPGNQGPPGPKGAKGEVGPPGPPGQFPFDFLQLEAEMKGEKGDRGDAGQKGERGEPGGGGFFGSSLPGPPGPPGPPGPRGYPGIPGPKGESIRGQPGPPGPQGPPGIGYEGRQGPPGPPGPPGPPSFPGPHRQTISVPGPPGPPGPPGPPGTMGASSGVRLWATRQAMLGQVHEVPEGWLIFVAEQEELYVRVQNGFRKVQLEARTPLPRGTDNEVAALQPPVVQLHDSNPYPRREHPHPTARPWRADDILASPPRLPEPQPYPGAPHHSSYVHLRPARPTSPPAHSHRDFQPVLHLVALNSPLSGGMRGIRGADFQCFQQARAVGLAGTFRAFLSSRLQDLYSIVRRADRAAVPIVNLKDELLFPSWEALFSGSEGPLKPGARIFSFDGKDVLRHPTWPQKSVWHGSDPNGRRLTESYCETWRTEAPSATGQASSLLGGRLLGQSAASCHHAYIVLCIENSFMTASK

SEQ ID NO: 212 - protein, 733 aa, Homo sapiens
MWSWKCLLFWAVLVTATLCTARPSPTLPEQDALPSSEDDDDDDDSSSEEKETDNTKPNRMPVAPYWTSPEKMEKKLHAVPAAKTVKFKCPSSGTPNPTLRWLKNGKEFKPDHRIGGYKVRYATWSIIMDSVVPSDKGNYTCIVENEYGSINHTYQLDVVERSPHRPILQAGLPANKTVALGSNVEFMCKVYSDPQPHIQWLKHIEVNGSKIGPDNLPYVQILKTAGVNTTDKEMEVLHLRNVSFEDAGEYTCLAGNSIGLSHHSAWLTVLEALEERPAVMTSPLYLEIIIYCTGAFLISCMVGSVIVYKMKSGTKKSDFHSQMAVHKLAKSIPLRRQVTVSADSSASMNSGVLLVRPSRLSSSGTPMLAGVSEYELPEDPRWELPRDRLVLGKPLGEGCFGQVVLAEAIGLDKDKPNRVTKVAVKMLKSDATEKDLSDLISEMEMMKMIGKHKNIINLLGACTQDGPLYVIVEYASKGNLREYLQARRPPGLEYCYNPSHNPEEQLSSKDLVSCAYQVARGMEYLASKKCIHRDLAARNVLVTEDNVMKIADFGLARDIHHIDYYKKTTNGRLPVKWMAPEALFDRIYTHQSDVWSFGVLLWEIFTLGGSPYPGVPVEELFKLLKEGHRMDKPSNCTNELYMMMRDCWHAVPSQRPTFKQLVEDLDRIVALTSNQEYLDLSMPLDQYSPSFPDTRSSTCSSGEDSVFSHEPLPEEPCLPRHPAQLANGGLKRR

SEQ ID NO: 213 - protein, 704 aa, Homo sapiens
MVSWGRFICLVVVTMATLSLARPSFSLVEDTTLEPEGAPYWTNTEKMEKRLHAVPAANTVKFRCPAGGNPMPTMRWLKNGKEFKQEHRIGGYKVRNQHWSLIMESVVPSDKGNYTCVVENEYGSINHTYHLDVVERSPHRPILQAGLPANASTVVGGDVEFVCKVYSDAQPHIQWIKHVEKNGSKYGPDGLPYLKVLKAAGVNTTDKEIEVLYIRNVTFEDAGEYTCLAGNSIGISFHSAWLTVLPAPGREKEITASPDYLEIAIYCIGVFLIACMVVTVILCRMKNTTKKPDFSSQPAVHKLTKRIPLRRQVSAESSSSMNSNTPLVRITTRLSSTADTPMLAGVSEYELPEDPKWEFPRDKLTLGKPLGEGCFGQVVMAEAVGIDKDKPKEAVTVAVKMLKDDATEKDLSDLVSEMEMMKMIGKHKNIINLLGACTQDGPLYVIVEYASKGNLREYLRARRPPGMEYSYDINRVPEEQMTFKDLVSCTYQLARGMEYLASQKCIHRDLAARNVLVTENNVMKIADFGLARDINNIDYYKKTTNGRLPVKWMAPEALFDRVYTHQSDVWSFGVLMWEIFTLGGSPYPGIPVEELFKLLKEGHRMDKPANCTNELYMMMRDCWHAVPSQRPTFKQLVEDLDRILTLTTNEEYLDLSQPLEQYSPSYPDTRSSCSSGDDSVFSPDPMPYEPCLPQYPHINGSVKT

SEQ ID NO: 214 - protein, 1541 aa, Homo sapiens
MSFLEEARAAGRAVVLALVLLLLPAVPVGASVPPRPLLPLQPGMPHVCAEQELTLVGRRQPCVQALSHTVPVWKAGCGWQAWCVGHERRTVYYMGYRQVYTTEARTVLRCCRGWMQQPDEEGCLSAECSASLCFHGGRCVPGSAQPCHCPPGFQGPRCQYDVDECRTHNGGCQHRCVNTPGSYLCECKPGFRLHTDSRTCLAINSCALGNGGCQHHCVQLTITRHRCQCRPGFQLQEDGRHCVRRSPCANRNGSCMHRCQVVRGLARCECHVGYQLAADGKACEDVDECAAGLAQCAHGCLNTQGSFKCVCHAGYELGADGRQCYRIEMEIVNSCEANNGGCSHGCSHTSAGPLCTCPRGYELDTDQRTCIDVDDCADSPCCQQVCTNNPGGYECGCYAGYRLSADGCGCEDVDECASSRGGCEHHCTNLAGSFQCSCEAGYRLHEDRRGCSPLEEPMVDLDGELPFVRPLPHIAVLQDELPQLFQDDDVGADEEEAELRGEHTLTEKFVCLDDSFGHDCSLTCDDCRNGGTCLLGLDGCDCPEGWTGLICNETCPPDTFGKNCSFSCSCQNGGTCDSVTGACRCPPGVSGTNCEDGCPKGYYGKHCRKKCNCANRGRCHRLYGACLCDPGLYGRFCHLTCPPWAFGPGCSEECQCVQPHTQSCDKRDGSCSCKAGFRGERCQAECELGYFGPGCWQACTCPVGVACDSVSGECGKRCPAGFQGEDCGQECPVGTFGVNCSSSCSCGGAPCHGVTGQCRCPPGRTGEDCEADCPEGRWGLGCQEICPACQHAARCDPETGACLCLPGFVGSRCQDVCPAGWYGPSCQTRCSCANDGHCHPATGHCSCAPGWTGFSCQRACDTGHWGPDCSHPCNCSAGHGSCDAISGLCLCEAGYVGPRCEQQCPQGHFGPGCEQRCQCQHGAACDHVSGACTCPAGWRGTFCEHACPAGFFGLDCRSACNCTAGAACDAVNGSCLCPAGRRGPRCAETCPAHTYGHNCSQACACFNGASCDPVHGQCHCAPGWMGPSCLQACPAGLYGDNCRHSCLCQNGGTCDPVSGHCACPEGWAGLACEKECLPRDVRAGCRHSGGCLNGGLCDPHTGRCLCPAGWTGDKCQSPCLRGWFGEACAQRCSCPPGAACHHVTGACRCPPGFTGSGCEQACPPGSFGEDCAQMCQCPGENPACHPATGTCSCAAGYHGPSCQQRCPPGRYGPGCEQLCGCLNGGSCDAATGACRCPTGFLGTDCNLTCPQGRFGPNCTHVCGCGQGAACDPVTGTCLCPPGRAGVRCERGCPQNRFGVGCEHTCSCRNGGLCHASNGSCSCGLGWTGRHCELACPPGRYGAACHLECSCHNNSTCEPATGTCRCGPGFYGQACEHPCPPGFHGAGCQGLCWCQHGAPCDPISGRCLCPAGFHGHFCERGCEPGSFGEGCHQRCDCDGGAPCDPVTGLCLCPPGRSGATCNLDCRRGQFGPSCTLHCDCGGGADCDPVSGQCHCVDGYMGPTCREGGPLRLPENPSLAQGSAGTLPASSRPTSRSGGPARH

SEQ ID NO: 215 - protein, 119 aa, Homo sapiens
MTAPGAAGRCPPTTWLGSLLLLVCLLASRSITEEVSEYCSHMIGSGHLQSLQRLIDSQMETSCQITFEFVDQEQLKDPVCYLKKAFLLVQDIMEDTMRFRDNTPNAIAIVQLQELSLRL

SEQ ID NO: 216 - protein, 383 aa, Homo sapiens
MPSGCRCLHLVCLLCILGAPGQPVRADDCSSHCDLAHGCCAPDGSCRCDPGWEGLHCERCVRMPGCQHGTCHQPWQCICHSGWAGKFCDKDEHICTTQSPCQNGGQCMYDGGGEYHCVCLPGFHGRDCERKAGPCEQAGSPCRNGGQCQDDQGFALNFTCRCLVGFVGARCEVNVDDCLMRPCANGATCLDGINRFSCLCPEGFAGRFCTINLDDCASRPCQRGARCRDRVHDFDCLCPSGYGGKTCELVLPVPDPPTTVDTPLGPTSAVVVPATGPAPHSAGAGLLRISVKEVVRRQEAGLGEPSLVALVVFGALTAALVLATVLLTLRAWRRGVCPPGPCCYPAPHYAPACQDQECQVSMLPAGLPLPRDLPPEPGKTTAL

SEQ ID NO: 217 - protein, 707 aa, Homo sapiens
MVSWGRFICLVVVTMATLSLARPSFSLVEDTTLEPEDAISSGDDEDDTDGAEDFVSENSNNKRAPYWTNTEKMEKRLHAVPAANTVKFRCPAGGNPMPTMRWLKNGKEFKQEHRIGGYKVRNQHWSLIMESVVPSDKGNYTCVVENEYGSINHTYHLDVVERSPHRPILQAGLPANASTVVGGDVEFVCKVYSDAQPHIQWIKHVEKNGSKYGPDGLPYLKVLKAAGVNTTDKEIEVLYIRNVTFEDAGEYTCLAGNSIGISFHSAWLTVLPAPGREKEITASPDYLEIAIYCIGVFLIACMVVTVILCRMKNTTKKPDFSSQPAVHKLTKRIPLRRQVTVSAESSSSMNSNTPLVRITTRLSSTADTPMLAGVSEYELPEDPKWEFPRDKLTLGKPLGEGCFGQVVMAEAVGIDKDKPKEAVTVAVKMLKDDATEKDLSDLVSEMEMMKMIGKHKNIINLLGACTQDGPLYVIVEYASKGNLREYLRARRPPGMEYSYDINRVPEEQMTFKDLVSCTYQLARGMEYLASQKCIHRDLAARNVLVTENNVMKIADFGLARDINNIDYYKKTTNGRLPVKWMAPEALFDRVYTHQSDVWSFGVLMWEIFTLGGSPYPGIPVEELFKLLKEGHRMDKPANCTNELYMMMRDCWHAVPSQRPTFKQLVEDLDRILTLTTNEEEKKVSGAVDCHKPPCNPSHLPCVLAVDQ

SEQ ID NO: 218 - protein, 821 aa, Homo sapiens
MVSWGRFICLVVVTMATLSLARPSFSLVEDTTLEPEEPPTKYQISQPEVYVAAPGESLEVRCLLKDAAVISWTKDGVHLGPNNRTVLIGEYLQIKGATPRDSGLYACTASRTVDSETWYFMVNVTDAISSGDDEDDTDGAEDFVSENSNNKRAPYWTNTEKMEKRLHAVPAANTVKFRCPAGGNPMPTMRWLKNGKEFKQEHRIGGYKVRNQHWSLIMESVVPSDKGNYTCVVENEYGSINHTYHLDVVERSPHRPILQAGLPANASTVVGGDVEFVCKVYSDAQPHIQWIKHVEKNGSKYGPDGLPYLKVLKAAGVNTTDKEIEVLYIRNVTFEDAGEYTCLAGNSIGISFHSAWLTVLPAPGREKEITASPDYLEIAIYCIGVFLIACMVVTVILCRMKNTTKKPDFSSQPAVHKLTKRIPLRRQVTVSAESSSSMNSNTPLVRITTRLSSTADTPMLAGVSEYELPEDPKWEFPRDKLTLGKPLGEGCFGQVVMAEAVGIDKDKPKEAVTVAVKMLKDDATEKDLSDLVSEMEMMKMIGKHKNIINLLGACTQDGPLYVIVEYASKGNLREYLRARRPPGMEYSYDINRVPEEQMTFKDLVSCTYQLARGMEYLASQKCIHRDLAARNVLVTENNVMKIADFGLARDINNIDYYKKTTNGRLPVKWMAPEALFDRVYTHQSDVWSFGVLMWEIFTLGGSPYPGIPVEELFKLLKEGHRMDKPANCTNELYMMMRDCWHAVPSQRPTFKQLVEDLDRILTLTTNEEYLDLSQPLEQYSPSYPDTRSSCSSGDDSVFSPDPMPYEPCLPQYPHINGSVKT

SEQ ID NO: 219 - protein, 96 aa, Homo sapiens
MCCTKSLLLAALMSVLLLHLCGESEAASNFDCCLGYTDRILHPKFIVGFTRQLANEGCDINAIIFHTKKKLSVCANPKQTWVKYIVRLLSKKVKNM

SEQ ID NO: 220 - protein, 1754 aa, Homo sapiens
MAPYPCGCHILLLLFCCLAAARANLLNLNWLWFNNEDTSHAATTIPEPQGPLPVQPTADTTTHVTPRNGSTEPATAPGSPEPPSELLEDGQDTPTSAESPDAPEENIAGVGAEILNVAKGIRSFVQLWNDTVPTESLARAETLVLETPVGPLALAGPSSTPQENGTTLWPSRGIPSSPGAHTTEAGTLPAPTPSPPSLGRPWAPLTGPSVPPPSSGRASLSSLLGGAPPWGSLQDPDSQGLSPAAAAPSQQLQRPDVRLRTPLLHPLVMGSLGKHAAPSAFSSGLPGALSQVAVTTLTRDSGAWVSHVANSVGPGLANNSALLGADPEAPAGRCLPLPPSLPVCGHLGISRFWLPNHLHHESGEQVRAGARAWGGLLQTHCHPFLAWFFCLLLVPPCGSVPPPAPPPCCQFCEALQDACWSRLGGGRLPVACASLPTQEDGYCVLIGPAAERISEEVGLLQLLGDPPPQQVTQTDDPDVGLAYVFGPDANSGQVARYHFPSLFFRDFSLLFHIRPATEGPGVLFAITDSAQAMVLLGVKLSGVQDGHQDISLLYTEPGAGQTHTAASFRLPAFVGQWTHLALSVAGGFVALYVDCEEFQRMPLARSSRGLELEPGAGLFVAQAGGADPDKFQGVIAELKVRRDPQVSPMHCLDEEGDDSDGASGDSGSGLGDARELLREETGAALKPRLPAPPPVTTPPLAGGSSTEDSRSEEVEEQTTVASLGAQTLPGSDSVSTWDGSVRTPGGRVKEGGLKGQKGEPGVPGPPGRAGPPGSPCLPGPPGLPCPVSPLGPAGPALQTVPGPQGPPGPPGRDGTPGRDGEPGDPGEDGKPGDTGPQGFPGTPGDVGPKGDKGDPGVGERGPPGPQGPPGPPGPSFRHDKLTFIDMEGSGFGGDLEALRGPRGFPGPPGPPGVPGLPGEPGRFGVNSSDVPGPAGLPGVPGREGPPGFPGLPGPPGPPGREGPPGRTGQKGSLGEAGAPGHKGSKGAPGPAGARGESGLAGAPGPAGPPGPPGPPGPPGPGLPAGFDDMEGSGGPFWSTARSADGPQGPPGLPGLKGDPGVPGLPGAKGEVGADGVPGFPGLPGREGIAGPQGPKGDRGSRGEKGDPGKDGVGQPGLPGPPGPPGPVVYVSEQDGSVLSVPGPEGRPGFAGFPGPAGPKGNLGSKGERGSPGPKGEKGEPGSIFSPDGGALGPAQKGAKGEPGFRGPPGPYGRPGYKGEIGFPGRPGRPGMNGLKGEKGEPGDASLGFGMRGMPGPPGPPGPPGPPGTPVYDSNVFAESSRPGPPGLPGNQGPPGPKGAKGEVGPPGPPGQFPFDFLQLEAEMKGEKGDRGDAGQKGERGEPGGGGFFGSSLPGPPGPPGPPGPRGYPGIPGPKGESIRGQPGPPGPQGPPGIGYEGRQGPPGPPGPPGPPSFPGPHRQTISVPGPPGPPGPPGPPGTMGASSGVRLWATRQAMLGQVHEVPEGWLIFVAEQEELYVRVQNGFRKVQLEARTPLPRGTDNEVAALQPPVVQLHDSNPYPRREHPHPTARPWRADDILASPPRLPEPQPYPGAPHHSSYVHLRPARPTSPPAHSHRDFQPVLHLVALNSPLSGGMRGIRGADFQCFQQARAVGLAGTFRAFLSSRLQDLYSIVRRADRAAVPIVNLKDELLFPSWEALFSGSEGPLKPGARIFSFDGKDVLRHPTWPQKSVWHGSDPNGRRLTESYCETWRTEAPSATGQASSLLGGRLLGQSAASCHHAYIVLCIENSFMTASK

SEQ ID NO: 221 - protein, 299 aa, Homo sapiens
MWLPWALLLLWVPGCFALSKCRTVAGPVGGSLSVQCPYEKEHRTLNKYWCRPPQIFLCDKIVETKGSAGKRNGRVSIRDSPANLSFTVTLENLTEEDAGTYWCGVDTPWLRDFHDPVVEVEVSVFPASTSMTPASITAAKTSTITTAFPPVSSTTLFAVGATHSASIQEETEEVVNSQLPLLLSLLALLLLLLVGASLLAWRMFQKWIKAGDHSELSQNPKQAATQSELHYANLELLMWPLQEKPAPPREVEVEYSTVASPREELHYASVVFDSNTNRIAAQRPREEEPDSDYSVIRKT

SEQ ID NO: 222 - protein, 680 aa, Homo sapiens
MVSWGRFICLVVVTMATLSLARPSFSLVEDTTLEPEDAISSGDDEDDTDGAEDFVSENSNNKRAPYWTNTEKMEKRLHAVPAANTVKFRCPAGGNPMPTMRWLKNGKEFKQEHRIGGYKVRNQHWSLIMESVVPSDKGNYTCVVENEYGSINHTYHLDVVERSPHRPILQAGLPANASTVVGGDVEFVCKVYSDAQPHIQWIKHVEKNGSKYGPDGLPYLKVLKHSGINSSNAEVLALFNVTEADAGEYICKVSNYIGQANQSAWLTVLPKQQAPGREKEITASPDYLEIAIYCIGVFLIACMVVTVILCRMKNTTKKPDFSSQPAVHKLTKRIPLRRQVTVSAESSSSMNSNTPLVRITTRLSSTADTPMLAGVSEYELPEDPKWEFPRDKLTLGKPLGEGCFGQVVMAEAVGIDKDKPKEAVTVAVKMLKDDATEKDLSDLVSEMEMMKMIGKHKNIINLLGACTQDGPLYVIVEYASKGNLREYLRARRPPGMEYSYDINRVPEEQMTFKDLVSCTYQLARGMEYLASQKCIHRDLAARNVLVTENNVMKIADFGLARDINNIDYYKKTTNGRLPVKWMAPEALFDRVYTHQSDVWSFGVLMWEIFTLGGSPYPGIPVEELFKLLKEGHRMDKPANCTNELYMMMRDCWHAVPSQRPTFKQLVEDLDRILTLTTNEI

SEQ ID NO: 223 - protein, 338 aa, Homo sapiens
MVVMAPRTLFLLLSGALTLTETWAGSHSMRYFSAAVSRPGRGEPRFIAMGYVDDTQFVRFDSDSACPRMEPRAPWVEQEGPEYWEEETRNTKAHAQTDRMNLQTLRGYYNQSEASSHTLQWMIGCDLGSDGRLLRGYEQYAYDGKDYLALNEDLRSWTAADTAAQISKRKCEAANVAEQRRAYLEGTCVEWLHRYLENGKEMLQRADPPKTHVTHHPVFDYEATLRCWALGFYPAEIILTWQRDGEDQTQDVELVETRPAGDGTFQKWAAVVVPSGEEQRYTCHVQHEGLPEPLMLRWKQSSLPTIPIMGIVAGLVVLAAVVTGAAVAAVLWRKKSSD

SEQ ID NO: 224 - protein, 533 aa, Homo sapiens
MKLWVSALLMAWFGVLSCVQAEFFTSIGHMTDLIYAEKELVQSLKEYILVEEAKLSKIKSWANKMEALTSKSAADAEGYLAHPVNAYKLVKRLNTDWPALEDLVLQDSAAGFIANLSVQRQFFPTDEDEIGAAKALMRLQDTYRLDPGTISRGELPGTKYQAMLSVDDCFGMGRSAYNEGDYYHTVLWMEQVLKQLDAGEEATTTKSQVLDYLSYAVFQLGDLHRALELTRRLLSLDPSHERAGGNLRYFEQLLEEEREKTLTNQTEAELATPEGIYERPVDYLPERDVYESLCRGEGVKLTPRRQKRLFCRYHHGNRAPQLLIAPFKEEDEWDSPHIVRYYDVMSDEEIERIKEIAKPKLARATVRDPKTGVLTVASYRVSKSSWLEEDDDPVVARVNRRMQHITGLTVKTAELLQVANYGVGGQYEPHFDFSRRPFDSGLKTEGNRLATFLNYMSDVEAGGATVFPDLGAAIWPKKGTAVFWYNLLRSGEGDYRTRHAACPVLVGCKWVSNKWFHERGQEFLRPCGSTEVD

SEQ ID NO: 225 - protein, 716 aa, Homo sapiens
MNNFRATILFWAAAAWAKSGKPSGEMDEVGVQKCKNALKLPVLEVLPGGGWDNLRNVDMGRVMELTYSNCRTTEDGQYIIPDEIFTIPQKQSNLEMNSEILESWANYQSSTSYSINTELSLFSKVNGKFSTEFQRMKTLQVKDQAITTRVQVRNLVYTVKINPTLELSSGFRKELLDISDRLENNQTRMATYLAELLVLNYGTHVTTSVDAGAALIQEDHLRASFLQDSQSSRSAVTASAGLAFQNTVNFKFEENYTSQNVLTKSYLSNRTNSRVQSIGGVPFYPGITLQAWQQGITNHLVAIDRSGLPLHFFINPNMLPDLPGPLVKKVSKTVETAVKRYYTFNTYPGCTDLNSPNFNFQANTDDGSCEGKMTNFSFGGVYQECTQLSGNRDVLLCQKLEQKNPLTGDFSCPSGYSPVHLLSQIHEEGYNHLECHRKCTLLVFCKTVCEDVFQVAKAEFRAFWCVASSQVPENSGLLFGGLFSSKSINPMTNAQSCPAGYFPLRLFENLKVCVSQDYELGSRFAVPFGGFFSCTVGNPLVDPAISRDLGAPSLKKCPGGFSQHPALISDGCQVSYCVKSGLFTGGSLPPARLPPFTRPPLMSQAATNTVIVTNSENARSWIKDSQTHQWRLGEPIELRRAMNVIHGDGGGLSGGAAAGVTVGVTTILAVVITLAIYGTRKFKKKAYQAIEERQSLVPGTAATGDTTYQEQGQSPA

SEQ ID NO: 226 - protein, 63 aa, Homo sapiens
MSSGTELLWPGAALLVLLGVAASLCVRCSRPGAKRSEKIYQQRSLREDQQSFTGSRTYSLVGQ

SEQ ID NO: 227 - protein, 103 aa, Homo sapiens
MWLPWALLLLWVPAGDHSELSQNPKQAATQSELHYANLELLMWPLQEKPAPPREVEVEYSTVASPREELHYASVVFDSNTNRIAAQRPREEEPDSDYSVIRKT

SEQ ID NO: 228 - protein, 125 aa, Homo sapiens
MKKSGVLFLLGIILLVLIGVQGTPVVRKGRCSCISTNQGTIHLQSLKDLKQFAPSPSCEKIEIIATLKNGVQTCLNPDSADVKELIKKWEKQVSQKKKQKNGKKHQKKKVLKVRKSQRSRQKKTT

SEQ ID NO: 229 - protein, 553 aa, Homo sapiens
MPLPWSLALPLLLSWVAGGFGNAASARHHGLLASARQPGVCHYGTKLACCYGWRRNSKGVCEATCEPGCKFGECVGPNKCRCFPGYTGKTCSQDVNECGMKPRPCQHRCVNTHGSYKCFCLSGHMLMPDATCVNSRTCAMINCQYSCEDTEEGPQCLCPSSGLRLAPNGRDCLDIDECASGKVICPYNRRCVNTFGSYYCKCHIGFELQYISGRYDCIDINECTMDSHTCSHHANCFNTQGSFKCKCKQGYKGNGLRCSAIPENSVKEVLRAPGTIKDRIKKLLAHKNSMKKKAKIKNVTPEPTRTPTPKVNLQPFNYEEIVSRGGNSHGGKKGNEEKMKEGLEDEKREEKALKNDIEERSLRGDVFFPKVNEAGEFGLILVQRKALTSKLEHKDLNISVDCSFNHGICDWKQDREDDFDWNPADRDNAIGFYMAVPALAGHKKDIGRLKLLLPDLQPQSNFCLLFDYRLAGDKVGKLRVFVKNSNNALAWEKTTSEDEKWKTGKIQLYQGTDATKSIIFEAERGKGKTGEIAVDGVLLVSGLCPDSLLSVDD

SEQ ID NO: 230 - protein, 1028 aa, Homo sapiens
MRAARALLPLLLQACWTAAQDEPETPRAVAFQDCPVDLFFVLDTSESVALRLKPYGALVDKVKSFTKRFIDNLRDRYYRCDRNLVWNAGALHYSDEVEIIQGLTRMPGGRDALKSSVDAVKYFGKGTYTDCAIKKGLEQLLVGGSHLKENKYLIVVTDGHPLEGYKEPCGGLEDAVNEAKHLGVKVFSVAITPDHLEPRLSIIATDHTYRRNFTAADWGQSRDAEEAISQTIDTIVDMIKNNVEQVCCSFECQPARGPPGLRGDPGFEGERGKPGLPGEKGEAGDPGRPGDLGPVGYQGMKGEKGSRGEKGSRGPKGYKGEKGKRGIDGVDGVKGEMGYPGLPGCKGSPGFDGIQGPPGPKGDPGAFGLKGEKGEPGADGEAGRPGSSGPSGDEGQPGEPGPPGEKGEAGDEGNPGPDGAPGERGGPGERGPRGTPGTRGPRGDPGEAGPQGDQGREGPVGVPGDPGEAGPIGPKGYRGDEGPPGSEGARGAPGPAGPPGDPGLMGERGEDGPAGNGTEGFPGFPGYPGNRGAPGINGTKGYPGLKGDEGEAGDPGDDNNDIAPRGVKGAKGYRGPEGPQGPPGHQGPPGPDECEILDIIMKMCSCCECKCGPIDLLFVLDSSESIGLQNFEIAKDFVVKVIDRLSRDELVKFEPGQSYAGVVQYSHSQMQEHVSLRSPSIRNVQELKEAIKSLQWMAGGTFTGEALQYTRDQLLPPSPNNRIALVITDGRSDTQRDTTPLNVLCSPGIQVVSVGIKDVFDFIPGSDQLNVISCQGLAPSQGRPGLSLVKENYAELLEDAFLKNVTAQICIDKKCPDYTCPITFSSPADITILLDGSASVGSHNFDTTKRFAKRLAERFLTAGRTDPAHDVRVAVVQYSGTGQQRPERASLQFLQNYTALASAVDAMDFINDATDVNDALGYVTRFYREASSGAAKKRLLLFSDGNSQGATPAAIEKAVQEAQRAGIEIFVVVVGRQVNEPHIRVLVTGKTAEYDVAYGESHLFRVPSYQALLRGVFHQTVSRKVALG

SEQ ID NO: 231 - protein, 172 aa, Homo sapiens
MVGPAPRRRLRPLAALALVLALAPGLPTARAGQTPRPAERGPPVRLFTEEELARYGGEEEDQPIYLAVKGVVFDVTSGKEFYGRGAPYNALTGKDSTRGVAKMSLDPADLTHDTTGLTAKELEALDEVFTKVYKAKYPIVGYTARRILNEDGSPNLDFKPEDQPHFDIKDEF

SEQ ID NO: 232 - protein, 1092 aa, Homo sapiens
MGAAGLLGVFLALVAPGVLGISCGSPPPILNGRISYYSTPIAVGTVIRYSCSGTFRLIGEKSLLCITKDKVDGTWDKPAPKCEYFNKYSSCPEPIVPGGYKIRGSTPYRHGDSVTFACKTNFSMNGNKSVWCQANNMWGPTRLPTCVSVFPLECPALPMIHNGHHTSENVGSIAPGLSVTYSCESGYLLVGEKIINCLSSGKWSAVPPTCEEARCKSLGRFPNGKVKEPPILRVGVTANFFCDEGYRLQGPPSSRCVIAGQGVAWTKMPVCEEIFCPSPPPILNGRHIGNSLANVSYGSIVTYTCDPDPEEGVNFILIGESTLRCTVDSQKTGTWSGPAPRCELSTSAVQCPHPQILRGRMVSGQKDRYTYNDTVIFACMFGFTLKGSKQIRCNAQGTWEPSAPVCEKECQAPPNILNGQKEDRHMVRFDPGTSIKYSCNPGYVLVGEESIQCTSEGVWTPPVPQCKVAACEATGRQLLTKPQHQFVRPDVNSSCGEGYKLSGSVYQECQGTIPWFMEIRLCKEITCPPPPVIYNGAHTGSSLEDFPYGTTVTYTCNPGPERGVEFSLIGESTIRCTSNDQERGTWSGPAPLCKLSLLAVQCSHVHIANGYKISGKEAPYFYNDTVTFKCYSGFTLKGSSQIRCKADNTWDPEIPVCEKGCQSPPGLHHGRHTGGNTVFFVSGMTVDYTCDPGYLLVGNKSIHCMPSGNWSPSAPRCEETCQHVRQSLQELPAGSRVELVNTSCQDGYQLTGHAYQMCQDAENGIWFKKIPLCKVIHCHPPPVIVNGKHTGMMAENFLYGNEVSYECDQGFYLLGEKKLQCRSDSKGHGSWSGPSPQCLRSPPVTRCPNPEVKHGYKLNKTHSAYSHNDIVYVDCNPGFIMNGSRVIRCHTDNTWVPGVPTCIKKAFIGCPPPPKTPNGNHTGGNIARFSPGMSILYSCDQGYLLVGEALLLCTHEGTWSQPAPHCKEVNCSSPADMDGIQKGLEPRKMYQYGAVVTLECEDGYMLEGSPQSQCQSDHQWNPPLAVCRSRSLAPVLCGIAAGLILLTFLIVITLYVISKHRARNYYTDTSQKEAFHLEAREVYSVDPYNPAS

SEQ ID NO: 233 - protein, 1033 aa, Homo sapiens
MGAAGLLGVFLALVAPGVLGISCGSPPPILNGRISYYSTPIAVGTVIRYSCSGTFRLIGEKSLLCITKDKVDGTWDKPAPKCEYFNKYSSCPEPIVPGGYKIRGSTPYRHGDSVTFACKTNFSMNGNKSVWCQANNMWGPTRLPTCVSVFPLECPALPMIHNGHHTSENVGSIAPGLSVTYSCESGYLLVGEKIINCLSSGKWSAVPPTCEEARCKSLGRFPNGKVKEPPILRVGVTANFFCDEGYRLQGPPSSRCVIAGQGVAWTKMPVCEEIFCPSPPPILNGRHIGNSLANVSYGSIVTYTCDPDPEEGVNFILIGESTLRCTVDSQKTGTWSGPAPRCELSTSAVQCPHPQILRGRMVSGQKDRYTYNDTVIFACMFGFTLKGSKQIRCNAQGTWEPSAPVCEKECQAPPNILNGQKEDRHMVRFDPGTSIKYSCNPGYVLVGEESIQCTSEGVWTPPVPQCKVAACEATGRQLLTKPQHQFVRPDVNSSCGEGYKLSGSVYQECQGTIPWFMEIRLCKEITCPPPPVIYNGAHTGSSLEDFPYGTTVTYTCNPGPERGVEFSLIGESTIRCTSNDQERGTWSGPAPLCKLSLLAVQCSHVHIANGYKISGKEAPYFYNDTVTFKCYSGFTLKGSSQIRCKADNTWDPEIPVCEKETCQHVRQSLQELPAGSRVELVNTSCQDGYQLTGHAYQMCQDAENGIWFKKIPLCKVIHCHPPPVIVNGKHTGMMAENFLYGNEVSYECDQGFYLLGEKKLQCRSDSKGHGSWSGPSPQCLRSPPVTRCPNPEVKHGYKLNKTHSAYSHNDIVYVDCNPGFIMNGSRVIRCHTDNTWVPGVPTCIKKAFIGCPPPPKTPNGNHTGGNIARFSPGMSILYSCDQGYLLVGEALLLCTHEGTWSQPAPHCKEVNCSSPADMDGIQKGLEPRKMYQYGAVVTLECEDGYMLEGSPQSQCQSDHQWNPPLAVCRSRSLAPVLCGIAAGLILLTFLIVITLYVISKHRARNYYTDTSQKEAFHLEAREVYSVDPYNPAS

SEQ ID NO: 234 - protein, 971 aa, Homo sapiens
MGAAGLLGVFLALVAPGVLGISCGSPPPILNGRISYYSTPIAVGTVIRYSCSGTFRLIGEKSLLCITKDKVDGTWDKPAPKCEYFNKYSSCPEPIVPGGYKIRGSTPYRHGDSVTFACKTNFSMNGNKSVWCQANNMWGPTRLPTCVSVFPLECPALPMIHNGHHTSENVGSIAPGLSVTYSCESGYLLVGEKIINCLSSGKWSAVPPTCEEARCKSLGRFPNGKVKEPPILRVGVTANFFCDEGYRLQGPPSSRCVIAGQGVAWTKMPVCEEIFCPSPPPILNGRHIGNSLANVSYGSIVTYTCDPDPEEGVNFILIGESTLRCTVDSQKTGTWSGPAPRCELSTSAVQCPHPQILRGRMVSGQKDRYTYNDTVIFACMFGFTLKGSKQIRCNAQGTWEPSAPVCEKECQAPPNILNGQKEDRHMVRFDPGTSIKYSCNPGYVLVGEESIQCTSEGVWTPPVPQCKVAACEATGRQLLTKPQHQFVRPDVNSSCGEGYKLSGSVYQECQGTIPWFMEIRLCKEITCPPPPVIYNGAHTGSSLEDFPYGTTVTYTCNPGPERGVEFSLIGESTIRCTSNDQERGTWSGPAPLCKLSLLAVQCSHVHIANGYKISGKEAPYFYNDTVTFKCYSGFTLKGSSQIRCKADNTWDPEIPVCEKETCQHVRQSLQELPAGSRVELVNTSCQDGYQLTGHAYQMCQDAENGIWFKKIPLCKVIHCHPPPVIVNGKHTGMMAENFLYGNEVSYECDQGFYLLGEKKLQCRSDSKGHGSWSGPSPQCLRSPPVTRCPNPEVKHGYKLNKTHSAYSHNDIVYVDCNPGFIMNGSRVIRCHTDNTWVPGVPTCIKKEVNCSSPADMDGIQKGLEPRKMYQYGAVVTLECEDGYMLEGSPQSQCQSDHQWNPPLAVCRSRSLAPVLCGIAAGLILLTFLIVITLYVISKHRARNYYTDTSQKEAFHLEAREVYSVDPYNPAS

SEQ ID NO: 235 - protein, 390 aa, Homo sapiens
MDFWLWPLYFLPVSGALRILPEVKVEGELGGSVTIKCPLPEMHVRIYLCREMAGSGTCGTVVSTTNFIKAEYKGRVTLKQYPRKNLFLVEVTQLTESDSGVYACGAGMNTDRGKTQKVTLNVHSEYEPSWEEQPMPETPKWFHLPYLFQMPAYASSSKFVTRVTTPAQRGKVPPVHHSSPTTQITHRPRVSRASSVAGDKPRTFLPSTTASKISALEGLLKPQTPSYNHHTRLHRQRALDYGSQSGREGQGFHILIPTILGLFLLALLGLVVKRAVERRKALSRRARRLAVRMRALESSQRPRGSPRPRSQNNIYSACPRRARGADAAGTGEAPVPGPGAPLPPAPLQVSESPWLHAPSLKTSCEYVSLYHQPAAMMEDSDSDDYINVPA

SEQ ID NO: 236 - protein, 967 aa, Homo sapiens
MPSPPGLRALWLCAALCASRRAGGAPQPGPGPTACPAPCHCQEDGIMLSADCSELGLSAVPGDLDPLTAYLDLSMNNLTELQPGLFHHLRFLEELRLSGNHLSHIPGQAFSGLYSLKILMLQNNQLGGIPAEALWELPSLQSLRLDANLISLVPERSFEGLSSLRHLWLDDNALTEIPVRALNNLPALQAMTLALNRISHIPDYAFQNLTSLVVLHLHNNRIQHLGTHSFEGLHNLETLDLNYNKLQEFPVAIRTLGRLQELGFHNNNIKAIPEKAFMGNPLLQTIHFYDNPIQFVGRSAFQYLPKLHTLSLNGAMDIQEFPDLKGTTSLEILTLTRAGIRLLPSGMCQQLPRLRVLELSHNQIEELPSLHRCQKLEEIGLQHNRIWEIGADTFSQLSSLQALDLSWNAIRSIHPEAFSTLHSLVKLDLTDNQLTTLPLAGLGGLMHLKLKGNLALSQAFSKDSFPKLRILEVPYAYQCCPYGMCASFFKASGQWEAEDLHLDDEESSKRPLGLLARQAENHYDQDLDELQLEMEDSKPHPSVQCSPTPGPFKPCEYLFESWGIRLAVWAIVLLSVLCNGLVLLTVFAGGPVPLPPVKFVVGAIAGANTLTGISCGLLASVDALTFGQFSEYGARWETGLGCRATGFLAVLGSEASVLLLTLAAVQCSVSVSCVRAYGKSPSLGSVRAGVLGCLALAGLAAALPLASVGEYGASPLCLPYAPPEGQPAALGFTVALVMMNSFCFLVVAGAYIKLYCDLPRGDFEAVWDCAMVRHVAWLIFADGLLYCPVAFLSFASMLGLFPVTPEAVKSVLLVVLPLPACLNPLLYLLFNPHFRDDLRRLRPRAGDSGPLAYAAAGELEKSSCDSTQALVAFSDVDLILEASEAGRPPGLETYGFPSVTLISCQQPGAPRLEGSHCVEPEGNHFGNPQPSMDGELLLRAEGSTPAGGGLSGGGGFQPSGLAFASHV

SEQ ID NO: 237 - protein, 1231 aa, Homo sapiens
MRLLAKIICLMLWAICVAEDCNELPPRRNTEILTGSWSDQTYPEGTQAIYKCRPGYRSLGNVIMVCRKGEWVALNPLRKCQKRPCGHPGDTPFGTFTLTGGNVFEYGVKAVYTCNEGYQLLGEINYRECDTDGWTNDIPICEVVKCLPVTAPENGKIVSSAMEPDREYHFGQAVRFVCNSGYKIEGDEEMHCSDDGFWSKEKPKCVEISCKSPDVINGSPISQKIIYKENERFQYKCNMGYEYSERGDAVCTESGWRPLPSCEEKSCDNPYIPNGDYSPLRIKHRTGDEITYQCRNGFYPATRGNTAKCTSTGWIPAPRCTLKPCDYPDIKHGGLYHENMRRPYFPVAVGKYYSYYCDEHFETPSGSYWDHIHCTQDGWSPAVPCLRKCYFPYLENGYNQNHGRKFVQGKSIDVACHPGYALPKAQTTVTCMENGWSPTPRCIRVKTCSKSSIDIENGFISESQYTYALKEKAKYQCKLGYVTADGETSGSITCGKDGWSAQPTCIKSCDIPVFMNARTKNDFTWFKLNDTLDYECHDGYESNTGSTTGSIVCGYNGWSDLPICYERECELPKIDVHLVPDRKKDQYKVGEVLKFSCKPGFTIVGPNSVQCYHFGLSPDLPICKEQVQSCGPPPELLNGNVKEKTKEEYGHSEVVEYYCNPRFLMKGPNKIQCVDGEWTTLPVCIVEESTCGDIPELEHGWAQLSSPPYYYGDSVEFNCSESFTMIGHRSITCIHGVWTQLPQCVAIDKLKKCKSSNLIILEEHLKNKKEFDHNSNIRYRCRGKEGWIHTVCINGRWDPEVNCSMAQIQLCPPPPQIPNSHNMTTTLNYRDGEKVSVLCQENYLIQEGEEITCKDGRWQSIPLCVEKIPCSQPPQIEHGTINSSRSSQESYAHGTKLSYTCEGGFRISEENETTCYMGKWSSPPQCEGLPCKSPPEISHGVVAHMSDSYQYGEEVTYKCFEGFGIDGPAIAKCLGEKWSHPPSCIKTDCLSLPSFENAIPMGEKKDVYKAGEQVTYTCATYYKMDGASNVTCINSRWTGRPTCRDTSCVNPPTVQNAYIVSRQMSKYPSGERVRYQCRSPYEMFGDEEVMCLNGNWTEPPQCKDSTGKCGPPPPIDNGDITSFPLSVYAPASSVEYQCQNLYQLEGNKRITCRNGQWSEPPKCLHPCVISREIMENYNIALRWTAKQKLYSRTGESVEFVCKRGYRLSSRSHTLRTTCWDGKLEYPTCAKR

SEQ ID NO: 238 - protein, 2229 aa, Homo sapiens
MFPGCPRLWVLVVLGTSWVGWGSQGTEAAQLRQFYVAAQGISWSYRPEPTNSSLNLSVTSFKKIVYREYEPYFKKEKPQSTISGLLGPTLYAEVGDIIKVHFKNKADKPLSIHPQGIRYSKLSEGASYLDHTFPAEKMDDAVAPGREYTYEWSISEDSGPTHDDPPCLTHIYYSHENLIEDFNSGLIGPLLICKKGTLTEGGTQKTFDKQIVLLFAVFDESKSWSQSSSLMYTVNGYVNGTMPDITVCAHDHISWHLLGMSSGPELFSIHFNGQVLEQNHHKVSAITLVSATSTTANMTVGPEGKWIISSLTPKHLQAGMQAYIDIKNCPKKTRNLKKITREQRRHMKRWEYFIAAEEVIWDYAPVIPANMDKKYRSQHLDNFSNQIGKHYKKVMYTQYEDESFTKHTVNPNMKEDGILGPIIRAQVRDTLKIVFKNMASRPYSIYPHGVTFSPYEDEVNSSFTSGRNNTMIRAVQPGETYTYKWNILEFDEPTENDAQCLTRPYYSDVDIMRDIASGLIGLLLICKSRSLDRRGIQRAADIEQQAVFAVFDENKSWYLEDNINKFCENPDEVKRDDPKFYESNIMSNFTLSAINGYVPESITTLGFCFDDTVQWHFCSVGTQNEILTIHFTGHSFIYGKRHEDTLTLFPMRGESVTVTMDNVGTWMLTSMNSSPRSKKLRLKFRDVKCIPDDDEDSYEIFEPPESTVMATRKMHDRLEPEDEESDADYDYQNRLAAALGIRSFRNSSLNQEEEEFNLTALALENGTEFVSSNTDIIVGSNYSSPSNISKFTVNNLAEPQKAPSHQQATTAGSPLRHLIGKNSVLNSSTAEHSSPYSEDPIEDPLQPDVTGIRLLSLGAGEFKSQEHAKHKGPKVERDQAAKHRFSWMKLLAHKVGRHLSQDTGSPSGMRPWEDLPSQDTGSPSRMRPWKDPPSDLLLLKQSNSSKILVGRWHLASEKGSYEIIQDTDEDTAVNNWLISPQNASRAWGESTPLANKPGKQSGHPKFPRVRHKSLQVRQDGGKSRLKKSQFLIKTRKKKKEKHTHHAPLSPRTFHPLRSEAYNTFSERRLKHSLVLHKSNETSLPTDLNQTLPSMDFGWIASLPDHNQNSSNDTGQASCPPGLYQTVPPEEHYQTFPIQDPDQMHSTSDPSHRSSSPELSEMLEYDRSHKSFPTDISQMSPSSEHEVWQTVISPDLSQVTLSPELSQTNLSPDLSHTTLSPELIQRNLSPALGQMPISPDLSHTTLSPDLSHTTLSLDLSQTNLSPELSQTNLSPALGQMPLSPDLSHTTLSLDFSQTNLSPELSHMTLSPELSQTNLSPALGQMPISPDLSHTTLSLDFSQTNLSPELSQTNLSPALGQMPLSPDPSHTTLSLDLSQTNLSPELSQTNLSPDLSEMPLFADLSQIPLTPDLDQMTLSPDLGETDLSPNFGQMSLSPDLSQVTLSPDISDTTLLPDLSQISPPPDLDQIFYPSESSQSLLLQEFNESFPYPDLGQMPSPSSPTLNDTFLSKEFNPLVIVGLSKDGTDYIEIIPKEEVQSSEDDYAEIDYVPYDDPYKTDVRTNINSSRDPDNIAAWYLRSNNGNRRNYYIAAEEISWDYSEFVQRETDIEDSDDIPEDTTYKKVVFRKYLDSTFTKRDPRGEYEEHLGILGPIIRAEVDDVIQVRFKNLASRPYSLHAHGLSYEKSSEGKTYEDDSPEWFKEDNAVQPNSSYTYVWHATERSGPESPGSACRAWAYYSAVNPEKDIHSGLIGPLLICQKGILHKDSNMPMDMREFVLLFMTFDEKKSWYYEKKSRSSWRLTSSEMKKSHEFHAINGMIYSLPGLKMYEQEWVRLHLLNIGGSQDIHVVHFHGQTLLENGNKQHQLGVWPLLPGSFKTLEMKASKPGWWLLNTEVGENQRAGMQTPFLIMDRDCRMPMGLSTGIISDSQIKASEFLGYWEPRLARLNNGGSYNAWSVEKLAAEFASKPWIQVDMQKEVIITGIQTQGAKHYLKSCYTTEFYVAYSSNQINWQIFKGNSTRNVMYFNGNSDASTIKENQFDPPIVARYIRISPTRAYNRPTLRLELQGCEVNGCSTPLGMENGKIENKQITASSFKKSWWGDYWEPFRARLNAQGRVNAWQAKANNNKQWLEIDLLKIKKITAIITQGCKSLSSEMYVKSYTIHYSEQGVEWKPYRLKSSMVDKIFEGNTNTKGHVKNFFNPPIISRFIRVIPKTWNQSIALRLELFGCDIY

SEQ ID NO: 239 - protein, 2224 aa, Homo sapiens
MFPGCPRLWVLVVLGTSWVGWGSQGTEAAQLRQFYVAAQGISWSYRPEPTNSSLNLSVTSFKKIVYREYEPYFKKEKPQSTISGLLGPTLYAEVGDIIKVHFKNKADKPLSIHPQGIRYSKLSEGASYLDHTFPAEKMDDAVAPGREYTYEWSISEDSGPTHDDPPCLTHIYYSHENLIEDFNSGLIGPLLICKKGTLTEGGTQKTFDKQIVLLFAVFDESKSWSQSSSLMYTVNGYVNGTMPDITVCAHDHISWHLLGMSSGPELFSIHFNGQVLEQNHHKVSAITLVSATSTTANMTVGPEGKWIISSLTPKHLQAGMQAYIDIKNCPKKTRNLKKITREQRRHMKRWEYFIAAEEVIWDYAPVIPANMDKKYRSQHLDNFSNQIGKHYKKVMYTQYEDESFTKHTVNPNMKEDGILGPIIRAQVRDTLKIVFKNMASRPYSIYPHGVTFSPYEDEVNSSFTSGRNNTMIRAVQPGETYTYKWNILEFDEPTENDAQCLTRPYYSDVDIMRDIASGLIGLLLICKSRSLDRRGIQRAADIEQQAVFAVFDENKSWYLEDNINKFCENPDEVKRDDPKFYESNIMSTINGYVPESITTLGFCFDDTVQWHFCSVGTQNEILTIHFTGHSFIYGKRHEDTLTLFPMRGESVTVTMDNVGTWMLTSMNSSPRSKKLRLKFRDVKCIPDDDEDSYEIFEPPESTVMATRKMHDRLEPEDEESDADYDYQNRLAAALGIRSFRNSSLNQEEEEFNLTALALENGTEFVSSNTDIIVGSNYSSPSNISKFTVNNLAEPQKAPSHQQATTAGSPLRHLIGKNSVLNSSTAEHSSPYSEDPIEDPLQPDVTGIRLLSLGAGEFKSQEHAKHKGPKVERDQAAKHRFSWMKLLAHKVGRHLSQDTGSPSGMRPWEDLPSQDTGSPSRMRPWKDPPSDLLLLKQSNSSKILVGRWHLASEKGSYEIIQDTDEDTAVNNWLISPQNASRAWGESTPLANKPGKQSGHPKFPRVRHKSLQVRQDGGKSRLKKSQFLIKTRKKKKEKHTHHAPLSPRTFHPLRSEAYNTFSERRLKHSLVLHKSNETSLPTDLNQTLPSMDFGWIASLPDHNQNSSNDTGQASCPPGLYQTVPPEEHYQTFPIQDPDQMHSTSDPSHRSSSPELSEMLEYDRSHKSFPTDISQMSPSSEHEVWQTVISPDLSQVTLSPELSQTNLSPDLSHTTLSPELIQRNLSPALGQMPISPDLSHTTLSPDLSHTTLSLDLSQTNLSPELSQTNLSPALGQMPLSPDLSHTTLSLDFSQTNLSPELSHMTLSPELSQTNLSPALGQMPISPDLSHTTLSLDFSQTNLSPELSQTNLSPALGQMPLSPDPSHTTLSLDLSQTNLSPELSQTNLSPDLSEMPLFADLSQIPLTPDLDQMTLSPDLGETDLSPNFGQMSLSPDLSQVTLSPDISDTTLLPDLSQISPPPDLDQIFYPSESSQSLLLQEFNESFPYPDLGQMPSPSSPTLNDTFLSKEFNPLVIVGLSKDGTDYIEIIPKEEVQSSEDDYAEIDYVPYDDPYKTDVRTNINSSRDPDNIAAWYLRSNNGNRRNYYIAAEEISWDYSEFVQRETDIEDSDDIPEDTTYKKVVFRKYLDSTFTKRDPRGEYEEHLGILGPIIRAEVDDVIQVRFKNLASRPYSLHAHGLSYEKSSEGKTYEDDSPEWFKEDNAVQPNSSYTYVWHATERSGPESPGSACRAWAYYSAVNPEKDIHSGLIGPLLICQKGILHKDSNMPMDMREFVLLFMTFDEKKSWYYEKKSRSSWRLTSSEMKKSHEFHAINGMIYSLPGLKMYEQEWVRLHLLNIGGSQDIHVVHFHGQTLLENGNKQHQLGVWPLLPGSFKTLEMKASKPGWWLLNTEVGENQRAGMQTPFLIMDRDCRMPMGLSTGIISDSQIKASEFLGYWEPRLARLNNGGSYNAWSVEKLAAEFASKPWIQVDMQKEVIITGIQTQGAKHYLKSCYTTEFYVAYSSNQINWQIFKGNSTRNVMYFNGNSDASTIKENQFDPPIVARYIRISPTRAYNRPTLRLELQGCEVNGCSTPLGMENGKIENKQITASSFKKSWWGDYWEPFRARLNAQGRVNAWQAKANNNKQWLEIDLLKIKKITAIITQGCKSLSSEMYVKSYTIHYSEQGVEWKPYRLKSSMVDKIFEGNTNTKGHVKNFFNPPIISRFIRVIPKTWNQSIALRLELFGCDIY

SEQ ID NO: 240 - protein, 114 aa, Homo sapiens
MRLLILALLGICSLTAYIVEGVGSEVSDKRTCVSLTTQRLPVSRIKTYTITEGSLRAVIFITKRGLKVCADPQATWVRDVVRSMDRKSNTRNNMIQTKPTGTQQSTNTAVTLTG

SEQ ID NO: 241 - protein, 114 aa, Homo sapiens
MRLLILALLGICSLTAYIVEGVGSEVSHRRTCVSLTTQRLPVSRIKTYTITEGSLRAVIFITKRGLKVCADPQATWVRDVVRSMDRKSNTRNNMIQTKPTGTQQSTNTAVTLTG

SEQ ID NO: 242 - protein, 319 aa, Homo sapiens
MVGKMWPVLWTLCAVRVTVDAISVETPQDVLRASQGKSVTLPCTYHTSTSSREGLIQWDKLLLTHTERVVIWPFSNKNYIHGELYKNRVSISNNAEQSDASITIDQLTMADNGTYECSVSLMSDLEGNTKSRVRLLVLVPPSKPECGIEGETIIGNNIQLTCQSKEGSPTPQYSWKRYNILNQEQPLAQPASGQPVSLKNISTDTSGYYICTSSNEEGTQFCNITVAVRSPSMNVALYVGIAVGVVAALIIIGIIIYCCCCRGKDDNTEDKEDARPNREAYEEPPEQLRELSREREEEDDYRQEEQRSTGRESPDHLDQ

SEQ ID NO: 243 - protein, 233 aa, Homo sapiens
MWQLLLPTALLLLVSAGMRTEDLPKAVVFLEPQWYSVLEKDSVTLKCQGAYSPEDNSTQWFHNENLISSQASSYFIDAATVNDSGEYRCQTNLSTLSDPVQLEVHIGWLLLQAPRWVFKEEDPIHLRCHSWKNTALHKVTYLQNGKDRKYFHHNSDFHIPKATLKDSGSYFCRGLVGSKNVSSETVNITITQGLAVSTISSFSPPGYQVSFCLVMVLLFAVDTGLYFSVKTNI

SEQ ID NO: 244 - protein, 254 aa, Homo sapiens
MWQLLLPTALLLLVSAGMRTEDLPKAVVFLEPQWYRVLEKDSVTLKCQGAYSPEDNSTQWFHNESLISSQASSYFIDAATVDDSGEYRCQTNLSTLSDPVQLEVHIGWLLLQAPRWVFKEEDPIHLRCHSWKNTALHKVTYLQNGKGRKYFHHNSDFYIPKATLKDSGSYFCRGLFGSKNVSSETVNITITQGLAVSTISSFFPPGYQVSFCLVMVLLFAVDTGLYFSVKTNIRSSTRDWKDHKFKWRKDPQDK

SEQ ID NO: 245 - protein, 370 aa, Homo sapiens
MLGQVVTLILLLLLKVYQGKGCQGSADHVVSISGVPLQLQPNSIQTKVDSIAWKKLLPSQNGFHHILKWENGSLPSNTSNDRFSFIVKNLSLLIKAAQQQDSGLYCLEVTSISGKVQTATFQVFVFESLLPDKVEKPRLQGQGKILDRGRCQVALSCLVSRDGNVSYAWYRGSKLIQTAGNLTYLDEEVDINGTHTYTCNVSNPVSWESHTLNLTQDCQNAHQEFRFWPFLVIIVILSALFLGTLACFCVWRRKRKEKQSETSPKEFLTIYEDVKDLKTRRNHEQEQTFPGGGSTIYSMIQSQSSAPTSQEPAYTLYSLIQPSRKSGSRKRNHSPSFNSTIYEVIGKSQPKAQNPARLSRKELENFDVYS

SEQ ID NO: 246 - protein, 365 aa, Homo sapiens
MLGQVVTLILLLLLKVYQGKGCQGSADHVVSISGVPLQLQPNSIQTKVDSIAWKKLLPSQNGFHHILKWENGSLPSNTSNDRFSFIVKNLSLLIKAAQQQDSGLYCLEVTSISGKVQTATFQVFVFDKVEKPRLQGQGKILDRGRCQVALSCLVSRDGNVSYAWYRGSKLIQTAGNLTYLDEEVDINGTHTYTCNVSNPVSWESHTLNLTQDCQNAHQEFRFWPFLVIIVILSALFLGTLACFCVWRRKRKEKQSETSPKEFLTIYEDVKDLKTRRNHEQEQTFPGGGSTIYSMIQSQSSAPTSQEPAYTLYSLIQPSRKSGSRKRNHSPSFNSTIYEVIGKSQPKAQNPARLSRKELENFDVYS

SEQ ID NO: 247 - protein, 228 aa, Homo sapiens
MAGSPTCLTLIYILWQLTEHLSKPKVTMGLQSNKNGTCVTNLTCCMEHGEEDVIYTWKALGQAANESHNGSILPISWRWGESDMTFICVARNPVSRNFSSPILARKLCEGAADDPDSSMVLLCLLLVPLLLSLFVLGLFLWFLKRERQEEYIEEKKRVDICRETPNICPHSGENTEYDTIPHTNRTILKEDPANTVYSTVEIPKKMENPHSLLTMPDTPRLFAYENVI

SEQ ID NO: 248 - protein, 221 aa, Homo sapiens
MLWLFQSLLFVFCFGPGQLRNIQVTNHSQLFQNMTCELHLTCSVEDADDNVSFRWEALGNTLSSQPNLTVSWDPRISSEQDYTCIAENAVSNLSFSVSAQKLCEDVKIQYTDTKMILFMVSGICIVFGFIILLLLVLRKRRDSLSLSTQRTQGPAESARNLEYVSVSPTNNTVYASVTHSNRETEIWTPRENDTITIYSTINHSKESKPTFSRATALDNVV

SEQ ID NO: 249 - protein, 332 aa, Homo sapiens
MLWLFQSLLFVFCFGPGNVVSQSSLTPLMVNGILGESVTLPLEFPAGEKVNFITWLFNETSLAFIVPHETKSPEIHVTNPKQGKRLNFTQSYSLQLSNLKMEDTGSYRAQISTKTSAKLSSYTLRILRQLRNIQVTNHSQLFQNMTCELHLTCSVEDADDNVSFRWEALGNTLSSQPNLTVSWDPRISSEQDYTCIAENAVSNLSFSVSAQKLCEDVKIQYTDTKMILFMVSGICIVFGFIILLLLVLRKRRDSLSLSTQRTQGPAESARNLEYVSVSPTNNTVYASVTHSNRETEIWTPRENDTITIYSTINHSKESKPTFSRATALDNVV

SEQ ID NO: 250 - protein, 331 aa, Homo sapiens
MLWLFQSLLFVFCFGPGNVVSQSSLTPLMVNGILGESVTLPLEFPAGEKVNFITWLFNETSLAFIVPHETKSPEIHVTNPKQGKRLNFTQSYSLQLSNLKMEDTGSYRAQISTKTSAKLSSYTLRILRQLRNIQVTNHSQLFQNMTCELHLTCSVEDADDNVSFRWEALGNTLSSQPNLTVSWDPRISSEQDYTCIAENAVSNLSFSVSAQKLCEDVKIQYTDTKMILFMVSGICIVFGFIILLLLVLRKRRDSLSLSTQRTQGPESARNLEYVSVSPTNNTVYASVTHSNRETEIWTPRENDTITIYSTINHSKESKPTFSRATALDNVV

SEQ ID NO: 251 - protein, 434 aa, Homo sapiens
MLLWTAVLLFVPCVGKTVWLYLQAWPNPVFEGDALTLRCQGWKNTPLSQVKFYRDGKFLHFSKENQTLSMGAATVQSRGQYSCSGQVMYIPQTFTQTSETAMVQVQELFPPPVLSAIPSPEPREGSLVTLRCQTKLHPLRSALRLLFSFHKDGHTLQDRGPHPELCIPGAKEGDSGLYWCEVAPEGGQVQKQSPQLEVRVQAPVSRPVLTLHHGPADPAVGDMVQLLCEAQRGSPPILYSFYLDEKIVGNHSAPCGGTTSLLFPVKSEQDAGNYSCEAENSVSRERSEPKKLSLKGSQVLFTPASNWLVPWLPASLLGLMVIAAALLVYVRSWRKAGPLPSQIPPTAPGGEQCPLYANVHHQKGKDEGVVYSVVHRTSKRSEARSAEFTVGRKDSSIICAEVRCLQPSEVSSTEVNMRSRTLQEPLSDCEEVLC

SEQ ID NO: 252 - protein, 224 aa, Homo sapiens
MAPAMESPTLLCVALLFFAPDGVLAVSSTKWFHNGSLSEETNSSLNIVNAKFEDSGEYKCQHQQVNESEPVYLEVFSDWLLLQASAEVVMEGQPLFLRCHGWRNWDVYKVIYYKDGEALKYWYENHNISITNATVEDSGTYYCTGKVWQLDYESEPLNITVIKAPREKYWLQFFIPLLVVILFAVDTGLFISTQQQVTFLLKIKRTRKGFRLLNPHPKPNPKNN

SEQ ID NO: 253 - protein, 257 aa, Homo sapiens
MAPAMESPTLLCVALLFFAPDGVLAVPQKPKVSLNPPWNRIFKGENVTLTCNGNNFFEVSSTKWFHNGSLSEETNSSLNIVNAKFEDSGEYKCQHQQVNESEPVYLEVFSDWLLLQASAEVVMEGQPLFLRCHGWRNWDVYKVIYYKDGEALKYWYENHNISITNATVEDSGTYYCTGKVWQLDYESEPLNITVIKAPREKYWLQFFIPLLVVILFAVDTGLFISTQQQVTFLLKIKRTRKGFRLLNPHPKPNPKNN

SEQ ID NO: 254 - protein, 734 aa, Homo sapiens
MLLWLLLLILTPGREQSGVAPKAVLLLNPPWSTAFKGEKVALICSSISHSLAQGDTYWYHDEKLLKIKHDKIQITEPGNYQCKTRGSSLSDAVHVEFSPDWLILQALHPVFEGDNVILRCQGKDNKNTHQKVYYKDGKQLPNSYNLEKITVNSVSRDNSKYHCTAYRKFYILDIEVTSKPLNIQVQELFLHPVLRASSSTPIEGSPMTLTCETQLSPQRPDVQLQFSLFRDSQTLGLGWSRSPRLQIPAMWTEDSGSYWCEVETVTHSIKKRSLRSQIRVQRVPVSNVNLEIRPTGGQLIEGENMVLICSVAQGSGTVTFSWHKEGRVRSLGRKTQRSLLAELHVLTVKESDAGRYYCAADNVHSPILSTWIRVTVRIPVSHPVLTFRAPRAHTVVGDLLELHCESLRGSPPILYRFYHEDVTLGNSSAPSGGGASFNLSLTAEHSGNYSCDADNGLGAQHSHGVSLRVTVPVSRPVLTLRAPGAQAVVGDLLELHCESLRGSFPILYWFYHEDDTLGNISAHSGGGASFNLSLTTEHSGNYSCEADNGLGAQHSKVVTLNVTGTSRNRTGLTAAGITGLVLSILVLAAAAALLHYARARRKPGGLSATGTSSHSPSECQEPSSSRPSRIDPQEPTHSKPLAPMELEPMYSNVNPGDSNPIYSQIWSIQHTKENSANCPMMHQEHEELTVLYSELKKTHPDDSAGEASSRGRAHEEDDEENYENVPRVLLASDH

SEQ ID NO: 255 - protein, 742 aa, Homo sapiens
MLLWLLLLILTPGREQSGVAPKAVLLLNPPWSTAFKGEKVALICSSISHSLAQGDTYWYHDEKLLKIKHDKIQITEPGNYQCKTRGSSLSDAVHVEFSPDWLILQALHPVFEGDNVILRCQGKDNKNTHQKVYYKDGKQLPNSYNLEKITVNSVSRDNSKYHCTAYRKFYILDIEVTSKPLNIQVQELFLHPVLRASSSTPIEGSPMTLTCETQLSPQRPDVQLQFSLFRDSQTLGLGWSRSPRLQIPAMWTEDSGSYWCEVETVTHSIKKRSLRSQIRVQRVPVSNVNLEIRPTGGQLIEGENMVLICSVAQGSGTVTFSWHKEGRVRSLGRKTQRSLLAELHVLTVKESDAGRYYCAADNVHSPILSTWIRVTVRIPVSHPVLTFRAPRAHTVVGDLLELHCESLRGSPPILYRFYHEDVTLGNSSAPSGGGASFNLSLTAEHSGNYSCDADNGLGAQHSHGVSLRVTVPVSRPVLTLRAPGAQAVVGDLLELHCESLRGSFPILYWFYHEDDTLGNISAHSGGGASFNLSLTTEHSGNYSCEADNGLGAQHSKVVTLNVTGTSRNRTGLTAAGITGLVLSILVLAAAAALLHYARARRKPGGLSATGTSSHSPSECQEPSSSRPSRIDPQEPTHSKPLAPMELEPMYSNVNPGDSNPIYSQIWSIQHTKENSANCPMMHQEHEELTVLYSELKKTHPDDSAGEASSRGRAHEEDDEENYENILNPRKNKVQDFPCLCNT

SEQ ID NO: 256 - protein, 468 aa, Homo sapiens
MLAVGCALLAALLAAPGAALAPRRCPAQEVARGVLTSLPGDSVTLTCPGVEPEDNATVHWVLRKPAAGSHPSRWAGMGRRLLLRSVQLHDSGNYSCYRAGRPAGTVHLLVDVPPEEPQLSCFRKSPLSNVVCEWGPRSTPSLTTKAVLLVRKFQNSPAEDFQEPCQYSQESQKFSCQLAVPEGDSSFYIVSMCVASSVGSKFSKTQTFQGCGILQPDPPANITVTAVARNPRWLSVTWQDPHSWNSSFYRLRFELRYRAERSKTFTTWMVKDLQHHCVIHDAWSGLRHVVQLRAQEEFGQGEWSEWSPEAMGTPWTESRSPPAENEVSTPMQALTTNKDDDNILFRDSANATSLPVQDSSSVPLPTFLVAGGSLAFGTLLCIAIVLRFKKTWKLRALKEGKTSMHPPYSLGQLVPERPRPTPVLVPLISPPVSPSSLGSDNTSSHNRPDARDPRSPYDISNTDYFFPR

SEQ ID NO: 257 - protein, 769 aa, Homo sapiens
MVSWGRFICLVVVTMATLSLARPSFSLVEDTTLEPEEPPTKYQISQPEVYVAAPGESLEVRCLLKDAAVISWTKDGVHLGPNNRTVLIGEYLQIKGATPRDSGLYACTASRTVDSETWYFMVNVTDAISSGDDEDDTDGAEDFVSENSNNKRAPYWTNTEKMEKRLHAVPAANTVKFRCPAGGNPMPTMRWLKNGKEFKQEHRIGGYKVRNQHWSLIMESVVPSDKGNYTCVVENEYGSINHTYHLDVVERSPHRPILQAGLPANASTVVGGDVEFVCKVYSDAQPHIQWIKHVEKNGSKYGPDGLPYLKVLKHSGINSSNAEVLALFNVTEADAGEYICKVSNYIGQANQSAWLTVLPKQQAPGREKEITASPDYLEIAIYCIGVFLIACMVVTVILCRMKNTTKKPDFSSQPAVHKLTKRIPLRRQVTVSAESSSSMNSNTPLVRITTRLSSTADTPMLAGVSEYELPEDPKWEFPRDKLTLGKPLGEGCFGQVVMAEAVGIDKDKPKEAVTVAVKMLKDDATEKDLSDLVSEMEMMKMIGKHKNIINLLGACTQDGPLYVIVEYASKGNLREYLRARRPPGMEYSYDINRVPEEQMTFKDLVSCTYQLARGMEYLASQKCIHRDLAARNVLVTENNVMKIADFGLARDINNIDYYKKTTNGRLPVKWMAPEALFDRVYTHQSDVWSFGVLMWEIFTLGGSPYPGIPVEELFKLLKEGHRMDKPANCTNELYMMMRDCWHAVPSQRPTFKQLVEDLDRILTLTTNEI

SEQ ID NO: 258 - protein, 768 aa, Homo sapiens
MVSWGRFICLVVVTMATLSLARPSFSLVEDTTLEPEEPPTKYQISQPEVYVAAPGESLEVRCLLKDAAVISWTKDGVHLGPNNRTVLIGEYLQIKGATPRDSGLYACTASRTVDSETWYFMVNVTDAISSGDDEDDTDGAEDFVSENSNNKRAPYWTNTEKMEKRLHAVPAANTVKFRCPAGGNPMPTMRWLKNGKEFKQEHRIGGYKVRNQHWSLIMESVVPSDKGNYTCVVENEYGSINHTYHLDVVERSPHRPILQAGLPANASTVVGGDVEFVCKVYSDAQPHIQWIKHVEKNGSKYGPDGLPYLKVLKHSGINSSNAEVLALFNVTEADAGEYICKVSNYIGQANQSAWLTVLPKQQAPGREKEITASPDYLEIAIYCIGVFLIACMVVTVILCRMKNTTKKPDFSSQPAVHKLTKRIPLRRQVTVSAESSSSMNSNTPLVRITTRLSSTADTPMLAGVSEYELPEDPKWEFPRDKLTLGKPLGEGCFGQVVMAEAVGIDKDKPKEAVTVAVKMLKDDATEKDLSDLVSEMEMMKMIGKHKNIINLLGACTQDGPLYVIVEYASKGNLREYLRARRPPGMEYSYDINRVPEEQMTFKDLVSCTYQLARGMEYLASQKCIHRDLAARNVLVTENNVMKIADFGLARDINNIDYYKKTTNGRLPVKWMAPEALFDRVYTHQSDVWSFGVLMWEIFTLGGSPYPGIPVEELFKLLKEGHRMDKPANCTNELYMMMRDCWHAVPSQRPTFKQLVEDLDRILTLTTNE

SEQ ID NO: 259 - protein, 707 aa, Homo sapiens
MVSWGRFICLVVVTMATLSLARPSFSLVEDTTLEPEGAPYWTNTEKMEKRLHAVPAANTVKFRCPAGGNPMPTMRWLKNGKEFKQEHRIGGYKVRNQHWSLIMESVVPSDKGNYTCVVENEYGSINHTYHLDVVERSPHRPILQAGLPANASTVVGGDVEFVCKVYSDAQPHIQWIKHVEKNGSKYGPDGLPYLKVLKHSGINSSNAEVLALFNVTEADAGEYICKVSNYIGQANQSAWLTVLPKQQAPGREKEITASPDYLEIAIYCIGVFLIACMVVTVILCRMKNTTKKPDFSSQPAVHKLTKRIPLRRQVTVSAESSSSMNSNTPLVRITTRLSSTADTPMLAGVSEYELPEDPKWEFPRDKLTLGKPLGEGCFGQVVMAEAVGIDKDKPKEAVTVAVKMLKDDATEKDLSDLVSEMEMMKMIGKHKNIINLLGACTQDGPLYVIVEYASKGNLREYLRARRPPGMEYSYDINRVPEEQMTFKDLVSCTYQLARGMEYLASQKCIHRDLAARNVLVTENNVMKIADFGLARDINNIDYYKKTTNGRLPVKWMAPEALFDRVYTHQSDVWSFGVLMWEIFTLGGSPYPGIPVEELFKLLKEGHRMDKPANCTNELYMMMRDCWHAVPSQRPTFKQLVEDLDRILTLTTNEEYLDLSQPLEQYSPSYPDTRSSCSSGDDSVFSPDPMPYEPCLPQYPHINGSVKT

SEQ ID NO: 260 - protein, 413 aa, Homo sapiens
MENMLLWLIFFTPGWTLIDGSEMEWDFMWHLRKVPRIVSERTFHLTSPAFEADAKMMVNTVCGIECQKELPTPSLSELEDYLSYETVFENGTRTLTRVKVQDLVLEPTQNITTKGVSVRRKRQVYGTDSRFSILDKRFLTNFPFSTAVKLSTGCSGILISPQHVLTAAHCVHDGKDYVKGSKKLRVGLLKMRNKSGGKKRRGSKRSRREASGGDQREGTREHLRERAKGGRRRKKSGRGQRIAEGRPSFQWTRVKNTHIPKGWARGGMGDATLDYDYALLELKRAHKKKYMELGISPTIKKMPGGMIHFSGFDNDRADQLVYRFCSVSDESNDLLYQYCDAESGSTGSGVYLRLKDPDKKNWKRKIIAVYSGHQWVDVHGVQKDYNVAVRITPLKYAQICLWIHGNDANCAYG

SEQ ID NO: 261 - protein, 438 aa, Homo sapiens
MTAPGAAGRCPPTTWLGSLLLLVCLLASRSITEEVSEYCSHMIGSGHLQSLQRLIDSQMETSCQITFEFVDQEQLKDPVCYLKKAFLLVQDIMEDTMRFRDNTPNAIAIVQLQELSLRLKSCFTKDYEEHDKACVRTFYETPLQLLEKVKNVFNETKNLLDKDWNIFSKNCNNSFAECSSQDVVTKPDCNCLYPKAIPSSDPASVSPHQPLAPSMAPVAGLTWEDSEGTEGSSLLPGEQPLHTVDPGSAKQRPPRSTCQSFEPPETPVVKDSTIGGSPQPRPSVGAFNPGMEDILDSAMGTNWVPEEASGEASEIPVPQGTELSPSRPGGGSMQTEPARPSNFLSASSPLPASAKGQQPADVTGHERQSEGSFSPQLQESVFHLLVPSVILVLLAVGGLLFYRWRRRSHQEPQRADSPLEQPEGSPLTQDDRQVELPV

SEQ ID NO: 262 - protein, 493 aa, Homo sapiens
MHPHRDPRGLWLLLPSLSLLLFEVARAGRAVVSCPAACLCASNILSCSKQQLPNVPHSLPSYTALLDLSHNNLSRLRAEWTPTRLTQLHSLLLSHNHLNFISSEAFSPVPNLRYLDLSSNQLRTLDEFLFSDLQVLEVLLLYNNHIMAVDRCAFDDMAQLQKLYLSQNQISRFPLELVKEGAKLPKLTLLDLSSNKLKNLPLPDLQKLPAWIKNGLYLHNNPLNCDCELYQLFSHWQYRQLSSVMDFQEDLYCMNSKKLHNVFNLSFLNCGEYKERAWEAHLGDTLIIKCDTKQQGMTKVWVTPSNERVLDEVTNGTVSVSKDGSLLFQQVQVEDGGVYTCYAMGETFNETLSVELKVHNFTLHGHHDTLNTAYTTLVGCILSVVLVLIYLYLTPCRCWCRGVEKPSSHQGDSLSSSMLSTTPNHDPMAGGDKDDGFDRRVAFLEPAGPGQGQNGKLKPGNTLPVPEATGKGQRRMSDPESVSSVFSDTPIVV

SEQ ID NO: 263 - protein, 540 aa, Homo sapiens
MPGKMVVILGASNILWIMFAASQAFKIETTPESRYLAQIGDSVSLTCSTTGCESPFFSWRTQIDSPLNGKVTNEGTTSTLTMNPVSFGNEHSYLCTATCESRKLEKGIQVEIYSFPKDPEIHLSGPLEAGKPITVKCSVADVYPFDRLEIDLLKGDHLMKSQEFLEDADRKSLETKSLEVTFTPVIEDIGKVLVCRAKLHIDEMDSVPTVRQAVKELQVYISPKNTVISVNPSTKLQEGGSVTMTCSSEGLPAPEIFWSKKLDNGNLQHLSGNATLTLIAMRMEDSGIYVCEGVNLIGKNRKEVELIVQVAPRDTTVLVSPSSILEEGSSVNMTCLSQGFPAPKILWSRQLPNGELQPLSENATLTLISTKMEDSGVYLCEGINQAGRSRKEVELIIQVTPKDIKLTAFPSESVKEGDTVIISCTCGNVPETWIILKKKAETGDTVLKSIDGAYTIRKAQLKDAGVYECESKNKVGSQLRSLTLDVQGRENNKDYFSPELLVLYFASSLIIPAIGMIIYFARKANMKGSYSLVEAQKSKV

SEQ ID NO: 264 - protein, 677 aa, Homo sapiens
MPGKMVVILGASNILWIMFAASQAFKIETTPESRYLAQIGDSVSLTCSTTGSFPKDPEIHLSGPLEAGKPITVKCSVADVYPFDRLEIDLLKGDHLMKSQEFLEDADRKSLETKSLEVTFTPVIEDIGKVLVCRAKLHIDEMDSVPTVRQAVKELQVYISPKNTVISVNPSTKLQEGGSVTMTCSSEGLPAPEIFWSKKLDNGNLQHLSGNATLTLIAMRMEDSGIYVCEGVNLIGKNRKEVELIVQEKPFTVEISPGPRIAAQIGDSVMLTCSVMGCESPSFSWRTQIDSPLSGKVRSEGTNSTLTLSPVSFENEHSYLCTVTCGHKKLEKGIQVELYSFPRDPEIEMSGGLVNGSSVTVSCKVPSVYPLDRLEIELLKGETILENIEFLEDTDMKSLENKSLEMTFIPTIEDTGKALVCQAKLHIDDMEFEPKQRQSTQTLYVNVAPRDTTVLVSPSSILEEGSSVNMTCLSQGFPAPKILWSRQLPNGELQPLSENATLTLISTKMEDSGVYLCEGINQAGRSRKEVELIIQVTPKDIKLTAFPSESVKEGDTVIISCTCGNVPETWIILKKKAETGDTVLKSIDGAYTIRKAQLKDAGVYECESKNKVGSQLRSLTLDVQGRENNKDYFSPELLVLYFASSLIIPAIGMIIYFARKANMKGSYSLVEAQKSKV

SEQ ID NO: 265 - protein, 343 aa, Homo sapiens
MPPPRTGRGLLWLGLVLSSVCVALGSETQANSTTDALNVLLIIVDDLRPSLGCYGDKLVRSPNIDQLASHSLLFQNAFAQQAVCAPSRVSFLTGRRPDTTRLYDFNSYWRVHAGNFSTIPQYFKENGYVTMSVGKVFHPGISSNHTDDSPYSWSFPPYHPSSEKYENTKTCRGPDGELHANLLCPVDVLDVPEGTLPDKQSTEQAIQLLEKMKTSASPFFLAVGYHKPHIPFRYPKEFQKLYPLENITLAPDPEVPDGLPPVAYNPWMDIRQREDVQALNISVPYGPIPVDFQRKIRQSYFASVSYLDTQVGRLLSALDDLQLANSTIIAFTSDHGFLMRTNT

SEQ ID NO: 266 - protein, 674 aa, Homo sapiens
MARAHWGCCPWLVLLCACAWGHTKPVDLGGQDVRNCSTNPPYLPVTVVNTTMSLTALRQQMQTQNLSAYIIPGTDAHMNEYIGQHDERRAWITGFTGSAGTAVVTMKKAAVWTDSRYWTQAERQMDCNWELHKEVGTTPIVTWLLTEIPAGGRVGFDPFLLSIDTWESYDLALQGSNRQLVSITTNLVDLVWGSERPPVPNQPIYALQEAFTGSTWQEKVSGVRSQMQKHQKVPTAVLLSALEETAWLFNLRASDIPYNPFFYSYTLLTDSSIRLFANKSRFSSETLSYLNSSCTGPMCVQIEDYSQVRDSIQAYSLGDVRIWIGTSYTMYGIYEMIPKEKLVTDTYSPVMMTKAVKNSKEQALLKASHVRDAVAVIRYLVWLEKNVPKGTVDEFSGAEIVDKFRGEEQFSSGPSFETISASGLNAALAHYSPTKELNRKLSSDEMYLLDSGGQYWDGTTDITRTVHWGTPSAFQKEAYTRVLIGNIDLSRLIFPAATSGRMVEAFARRALWDAGLNYGHGTGHGIGNFLCVHEWPVGFQSNNIAMAKGMFTSIEPGYYKDGEFGIRLEDVALVVEAKTKYPGSYLTFEVVSFVPYDRNLIDVSLLSPEHLQYLNRYYQTIREKVGPELQRRQLLEEFEWLQQHTEPLAARAPDTASWASVLVVSTLAILGWSV

SEQ ID NO: 267 - protein, 203 aa, Homo sapiens
MVRLPLQCVLWGCLLTAVHPEPPTACREKQYLINSQCCSLCQPGQKLVSDCTEFTETECLPCGESEFLDTWNRETHCHQHKYCDPNLGLRVQQKGTSETDTICTCEEGWHCTSEACESCVLHRSCSPGFGVKQIATGVSDTICEPCPVGFFSNVSSAFEKCHPWTRSPGSAESPGGDPHHLRDPVCHPLGAGLYQKGGQEANQ

SEQ ID NO: 268 - protein, 277 aa, Homo sapiens
MVRLPLQCVLWGCLLTAVHPEPPTACREKQYLINSQCCSLCQPGQKLVSDCTEFTETECLPCGESEFLDTWNRETHCHQHKYCDPNLGLRVQQKGTSETDTICTCEEGWHCTSEACESCVLHRSCSPGFGVKQIATGVSDTICEPCPVGFFSNVSSAFEKCHPWTSCETKDLVVQQAGTNKTDVVCGPQDRLRALVVIPIIFGILFAILLVLVFIKKVAKKPTNKAPHPKQEPQEINFPDDLPGSNTAAPVQETLHGCQPVTQEDGKESRISVQERQ

SEQ ID NO: 269 - protein, 493 aa, Homo sapiens
MALFGALFLALLAGAHAEFPGCKIRVTSKALELVKQEGLRFLEQELETITIPDLRGKEGHFYYNISEVKVTELQLTSSELDFQPQQELMLQITNASLGLRFRRQLLYWFFYDGGYINASAEGVSIRTGLELSRDPAGRMKVSNVSCQASVSRMHAAFGGTFKKVYDFLSTFITSGMRFLLNQQICPVLYHAGTVLLNSLLDTVPVRSSVDELVGIDYSLMKDPVASTSNLDMDFRGAFFPLTERNWSLPNRAVEPQLQEEERMVYVAFSEFFFDSAMESYFRAGALQLLLVGDKVPHDLDMLLRATYFGSIVLLSPAVIDSPLKLELRVLAPPRCTIKPSGTTISVTASVTIALVPPDQPEVQLSSMTMDARLSAKMALRGKALRTQLDLRRFRIYSNHSALESLALIPLQAPLKTMLQIGVMPMLNERTWRGVQIPLPEGINFVHEVVTNHAGFLTIGADLHFAKGLREVIEKNRPADVRASTAPTPSTAAV

SEQ ID NO: 270 - protein, 377 aa, Homo sapiens
MPSGCRCLHLVCLLCILGAPGQPVRADDCSSHCDLAHGCCAPDGSCRCDPGWEGLHCERCVRMPGCQHGTCHQPWQCICHSGWADEHICTTQSPCQNGGQCMYDGGGEYHCVCLPGFHGRDCERKAGPCEQAGSPCRNGGQCQDDQGFALNFTCRCLVGFVGARCEVNVDDCLMRPCANGATCLDGINRFSCLCPEGFAGRFCTINLDDCASRPCQRGARCRDRVHDFDCLCPSGYGGKTCELVLPVPDPPTTVDTPLGPTSAVVVPATGPAPHSAGAGLLRISVKEVVRRQEAGLGEPSLVALVVFGALTAALVLATVLLTLRAWRRGVCPPGPCCYPAPHYAPACQDQECQVSMLPAGLPLPRDLPPEPGKTTAL

SEQ ID NO: 271 - protein, 198 aa, Homo sapiens
MAPARLFALLLFFVGGVAESIRETEVIDPQDLLEGRYFSGALPDDEDVVGPGQESDDFELSGSGDLDDLEDSMIGPEVVHPLVPLDNHIPERAGSGSQVPTEPKKLEENEVIPKRISPVEESEDVSNKVSMSSTVQGSNIFERTEVLAALIVGGIVGILFAVFLILLLMYRMKKKDEGSYDLGKKPIYKKAPTNEFYA

SEQ ID NO: 272 - protein, 431 aa, Homo sapiens
MRALLARLLLCVLVVSDSKGSNELHQVPSNCDCLNGGTCVSNKYFSNIHWCNCPKKFGGQHCEIDKSKTCYEGNGHFYRGKASTDTMGRPCLPWNSATVLQQTYHAHRSDALQLGLGKHNYCRNPDNRRRPWCYVQVGLKLLVQECMVHDCADGKKPSSPPEELKFQCGQKTLRPRFKIIGGEFTTIENQPWFAAIYRRHRGGSVTYVCGGSLISPCWVISATHCFIDYPKKEDYIVYLGRSRLNSNTQGEMKFEVENLILHKDYSADTLAHHNDIALLKIRSKEGRCAQPSRTIQTICLPSMYNDPQFGTSCEITGFGKENSTDYLYPEQLKMTVVKLISHRECQQPHYYGSEVTTKMLCAADPQWKTDSCQGDSGGPLVCSLQGRMTLTGIVSWGRGCALKDKPGVYTRVSHFLPWIRSHTKEENGLAL

SEQ ID NO: 273 - protein, 463 aa, Homo sapiens
MHGSCSFLMLLLPLLLLLVATTGPVGALTDEEKRLMVELHNLYRAQVSPTASDMLHMRWDEELAAFAKAYARQCVWGHNKERGRRGENLFAITDEGMDVPLAMEEWHHEREHYNLSAATCSPGQMCGHYTQVVWAKTERIGCGSHFCEKLQGVEETNIELLVCNYEPPGNVKGKRPYQEGTPCSQCPSGYHCKNSLCEPIGSPEDAQDLPYLVTEAPSFRATEASDSRKMGTPSSLATGIPAFLVTEVSGSLATKALPAVETQAPTSLATKDPPSMATEAPPCVTTEVPSILAAHSLPSLDEEPVTFPKSTHVPIPKSADKVTDKTKVPSRSPENSLDPKMSLTGARELLPHAQEEAEAEAELPPSSEVLASVFPAQDKPGELQATLDHTGHTSSKSLPNFPNTSATANATGGRALALQSSLPGAEGPDKPSVVSGLNSGPGHVWGPLLGLLLLPPLVLAGIF

SEQ ID NO: 274 - protein, 722 aa, Homo sapiens
MGRGPWDAGPSRRLLPLLLLLGLARGAAGAPGPDGLDVCATCHEHATCQQREGKKICICNYGFVGNGRTQCVDKNECQFGATLVCGNHTSCHNTPGGFYCICLEGYRATNNNKTFIPNDGTFCTDIDECEVSGLCRHGGRCVNTHGSFECYCMDGYLPRNGPEPFHPTTDATSCTEIDCGTPPEVPDGYIIGNYTSSLGSQVRYACREGFFSVPEDTVSSCTGLGTWESPKLHCQEINCGNPPEMRHAILVGNHSSRLGGVARYVCQEGFESPGGKITSVCTEKGTWRESTLTCTEILTKINDVSLFNDTCVRWQINSRRINPKISYVISIKGQRLDPMESVREETVNLTTDSRTPEVCLALYPGTNYTVNISTAPPRRSMPAVIGFQTAEVDLLEDDGSFNISIFNETCLKLNRRSRKVGSEHMYQFTVLGQRWYLANFSHATSFNFTTREQVPVVCLDLYPTTDYTVNVTLLRSPKRHSVQITIATPPAVKQTISNISGFNETCLRWRSIKTADMEEMYLFHIWGQRWYQKEFAQEMTFNISSSSRDPEVCLDLRPGTNYNVSLRALSSELPVVISLTTQITEPPLPEVEFFTVHRGPLPRLRLRKAKEKNGPISSYQVLVLPLALQSTFSCDSEGASSFFSNASDADGYVAAELLAKDVPDDAMEIPIGDRLYYGEYYNAPLKRGSDYCIILRITSEWNKIRHSCCCRWRVLDWVPWLL

SEQ ID NO: 275 - protein, 757 aa, Homo sapiens
MGRGPWDAGPSRRLLPLLLLLGLARGAAGAPGPDGLDVCATCHEHATCQQREGKKICICNYGFVGNGRTQCVDKNECQFGATLVCGNHTSCHNTPGGFYCICLEGYRATNNNKTFIPNDGTFCTDIDECEVSGLCRHGGRCVNTHGSFECYCMDGYLPRNGPEPFHPTTDATSCTEIDCGTPPEVPDGYIIGNYTSSLGSQVRYACREGFFSVPEDTVSSCTGLGTWESPKLHCQEINCGNPPEMRHAILVGNHSSRLGGVARYVCQEGFESPGGKITSVCTEKGTWRESTLTCTEILTKINDVSLFNDTCVRWQINSRRINPKISYVISIKGQRLDPMESVREETVNLTTDSRTPEVCLALYPGTNYTVNISTAPPRRSMPAVIGFQTAEVDLLEDDGSFNISIFNETCLKLNRRSRKVGSEHMYQFTVLGQRWYLANFSHATSFNFTTREQVPVVCLDLYPTTDYTVNVTLLRSPKRHSVQITIATPPAVKQTISNISGFNETCLRWRSIKTADMEEMYLFHIWGQRWYQKEFAQEMTFNISSSSRDPEVCLDLRPGTNYNVSLRALSSELPVVISLTTQITEPPLPEVEFFTVHRGPLPRLRLRKAKEKNGPISSYQVLVLPLALQSTFSCDSEGASSFFSNASDADGYVAAELLAKDVPDDAMEIPIGDRLYYGEYYNAPLKRGSDYCIILRITSEWNKVRRHSCAVWAQVKEIPCNCNFLRLHIHRANSGDTQIRHSCCCRWRVLDWVPWLL

SEQ ID NO: 276 - protein, 747 aa, Homo sapiens
MGRGPWDAGPSRRLLPLLLLLGLARGAAGAPGPDGLDVCATCHEHATCQQREGKKICICNYGFVGNGRTQCVDKNECQFGATLVCGNHTSCHNTPGGFYCICLEGYRATNNNKTFIPNDGTFCTDIDECEVSGLCRHGGRCVNTHGSFECYCMDGYLPRNGPEPFHPTTDATSCTEIDCGTPPEVPDGYIIGNYTSSLGSQVRYACREGFFSVPEDTVSSCTGLGTWESPKLHCQEINCGNPPEMRHAILVGNHSSRLGGVARYVCQEGFESPGGKITSVCTEKGTWRESTLTCTEILTKINDVSLFNDTCVRWQINSRRINPKISYVISIKGQRLDPMESVREETVNLTTDSRTPEVCLALYPGTNYTVNISTAPPRRSMPAVIGFQTAEVDLLEDDGSFNISIFNETCLKLNRRSRKVGSEHMYQFTVLGQRWYLANFSHATSFNFTTREQVPVVCLDLYPTTDYTVNVTLLRSPKRHSVQITIATPPAVKQTISNISGFNETCLRWRSIKTADMEEMYLFHIWGQRWYQKEFAQEMTFNISSSSRDPEVCLDLRPGTNYNVSLRALSSELPVVISLTTQITEPPLPEVEFFTVHRGPLPRLRLRKAKEKNGPISSYQVLVLPLALQSTFSCDSEGASSFFSNASDADGYVAAELLAKDVPDDAMEIPIGDRLYYGEYYNAPLKRGSDYCIILRITSEWNKVRRHSCAVWAQVKDSSLMLLQMAGVGLGSLAVVIILTFLSFSAV

SEQ ID NO: 277 - protein, 530 aa, Homo sapiens
MTSSLQRPWRVPWLPWTILLVSTAAASQNQERLCAFKDPYQQDLGIGESRISHENGTILCSKGSTCYGLWEKSKGDINLVKQGCWSHIGDPQECHYEECVVTTTPPSIQNGTYRFCCCSTDLCNVNFTENFPPPDTTPLSPPHSFNRDETIIIALASVSVLAVLIVALCFGYRMLTGDRKQGLHSMNMMEAAASEPSLDLDNLKLLELIGRGRYGAVYKGSLDERPVAVKVFSFANRQNFINEKNIYRVPLMEHDNIARFIVGDERVTADGRMEYLLVMEYYPNGSLCKYLSLHTSDWVSSCRLAHSVTRGLAYLHTELPRGDHYKPAISHRDLNSRNVLVKNDGTCVISDFGLSMRLTGNRLVRPGEEDNAAISEVGTIRYMAPEVLEGAVNLRDCESALKQVDMYALGLIYWEIFMRCTDLFPGESVPEYQMAFQTEVGNHPTFEDMQVLVSREKQRPKFPEAWKENSLAVRSLKETIEDCWDQDAEARLTAQCAEERMAELMMIWERNKSVSPTVNPMSTAMQNERR

SEQ ID NO: 278 - protein, 1038 aa, Homo sapiens
MTSSLQRPWRVPWLPWTILLVSTAAASQNQERLCAFKDPYQQDLGIGESRISHENGTILCSKGSTCYGLWEKSKGDINLVKQGCWSHIGDPQECHYEECVVTTTPPSIQNGTYRFCCCSTDLCNVNFTENFPPPDTTPLSPPHSFNRDETIIIALASVSVLAVLIVALCFGYRMLTGDRKQGLHSMNMMEAAASEPSLDLDNLKLLELIGRGRYGAVYKGSLDERPVAVKVFSFANRQNFINEKNIYRVPLMEHDNIARFIVGDERVTADGRMEYLLVMEYYPNGSLCKYLSLHTSDWVSSCRLAHSVTRGLAYLHTELPRGDHYKPAISHRDLNSRNVLVKNDGTCVISDFGLSMRLTGNRLVRPGEEDNAAISEVGTIRYMAPEVLEGAVNLRDCESALKQVDMYALGLIYWEIFMRCTDLFPGESVPEYQMAFQTEVGNHPTFEDMQVLVSREKQRPKFPEAWKENSLAVRSLKETIEDCWDQDAEARLTAQCAEERMAELMMIWERNKSVSPTVNPMSTAMQNERNLSHNRRVPKIGPYPDYSSSSYIEDSIHHTDSIVKNISSEHSMSSTPLTIGEKNRNSINYERQQAQARIPSPETSVTSLSTNTTTTNTTGLTPSTGMTTISEMPYPDETNLHTTNVAQSIGPTPVCLQLTEEDLETNKLDPKEVDKNLKESSDENLMEHSLKQFSGPDPLSSTSSSLLYPLIKLAVEATGQQDFTQTANGQACLIPDVLPTQIYPLPKQQNLPKRPTSLPLNTKNSTKEPRLKFGSKHKSNLKQVETGVAKMNTINAAEPHVVTVTMNGVAGRNHSVNSHAATTQYANGTVLSGQTTNIVTHRAQEMLQNQFIGEDTRLNINSSPDEHEPLLRREQQAGHDEGVLDRLVDRRERPLEGGRTNSNNNNSNPCSEQDVLAQGVPSTAADPGPSKPRRAQRPNSLDLSATNVLDGSSIQIGESTQDGKSGSGEKIKKRVKTPYSLKRWRPSTWVISTESLDCEVNNNGSNRAVHSKSSTAVYLAEGGTATTMVSKDIGMNCL

SEQ ID NO: 279 - protein, 4391 aa, Homo sapiens
MGWRAAGALLLALLLHGRLLAVTHGLRAYDGLSLPEDIETVTASQMRWTHSYLSDDEDMLADSISGDDLGSGDLGSGDFQMVYFRALVNFTRSIEYSPQLEDAGSREFREVSEAVVDTLESEYLKIPGDQVVSVVFIKELDGWVFVELDVGSEGNADGAQIQEMLLRVISSGSVASYVTSPQGFQFRRLGTVPQFPRACTEAEFACHSYNECVALEYRCDRRPDCRDMSDELNCEEPVLGISPTFSLLVETTSLPPRPETTIMRQPPVTHAPQPLLPGSVRPLPCGPQEAACRNGHCIPRDYLCDGQEDCEDGSDELDCGPPPPCEPNEFPCGNGHCALKLWRCDGDFDCEDRTDEANCPTKRPEEVCGPTQFRCVSTNMCIPASFHCDEESDCPDRSDEFGCMPPQVVTPPRESIQASRGQTVTFTCVAIGVPTPIINWRLNWGHIPSHPRVTVTSEGGRGTLIIRDVKESDQGAYTCEAMNARGMVFGIPDGVLELVPQRGPCPDGHFYLEHSAACLPCFCFGITSVCQSTRRFRDQIRLRFDQPDDFKGVNVTMPAQPGTPPLSSTQLQIDPSLHEFQLVDLSRRFLVHDSFWALPEQFLGNKVDSYGGSLRYNVRYELARGMLEPVQRPDVVLMGAGYRLLSRGHTPTQPGALNQRQVQFSEEHWVHESGRPVQRAELLQVLQSLEAVLIQTVYNTKMASVGLSDIAMDTTVTHATSHGRAHSVEECRCPIGYSGLSCESCDAHFTRVPGGPYLGTCSGCNCNGHASSCDPVYGHCLNCQHNTEGPQCNKCKAGFFGDAMKATATSCRPCPCPYIDASRRFSDTCFLDTDGQATCDACAPGYTGRRCESCAPGYEGNPIQPGGKCRPVNQEIVRCDERGSMGTSGEACRCKNNVVGRLCNECADGSFHLSTRNPDGCLKCFCMGVSRHCTSSSWSRAQLHGASEEPGHFSLTNAASTHTTNEGIFSPTPGELGFSSFHRLLSGPYFWSLPSRFLGDKVTSYGGELRFTVTQRSQPGSTPLHGQPLVVLQGNNIILEHHVAQEPSPGQPSTFIVPFREQAWQRPDGQPATREHLLMALAGIDTLLIRASYAQQPAESRVSGISMDVAVPEETGQDPALEVEQCSCPPGYRGPSCQDCDTGYTRTPSGLYLGTCERCSCHGHSEACEPETGACQGCQHHTEGPRCEQCQPGYYGDAQRGTPQDCQLCPCYGDPAAGQAAHTCFLDTDGHPTCDACSPGHSGRHCERCAPGYYGNPSQGQPCQRDSQVPGPIGCNCDPQGSVSSQCDAAGQCQCKAQVEGLTCSHCRPHHFHLSASNPDGCLPCFCMGITQQCASSAYTRHLISTHFAPGDFQGFALVNPQRNSRLTGEFTVEPVPEGAQLSFGNFAQLGHESFYWQLPETYQGDKVAAYGGKLRYTLSYTAGPQGSPLSDPDVQITGNNIMLVASQPALQGPERRSYEIMFREEFWRRPDGQPATREHLLMALADLDELLIRATFSSVPLAASISAVSLEVAQPGPSNRPRALEVEECRCPPGYIGLSCQDCAPGYTRTGSGLYLGHCELCECNGHSDLCHPETGACSQCQHNAAGEFCELCAPGYYGDATAGTPEDCQPCACPLTNPENMFSRTCESLGAGGYRCTACEPGYTGQYCEQCGPGYVGNPSVQGGQCLPETNQAPLVVEVHPARSIVPQGGSHSLRCQVSGSPPHYFYWSREDGRPVPSGTQQRHQGSELHFPSVQPSDAGVYICTCRNLHQSNTSRAELLVTEAPSKPITVTVEEQRSQSVRPGADVTFICTAKSKSPAYTLVWTRLHNGKLPTRAMDFNGILTIRNVQLSDAGTYVCTGSNMFAMDQGTATLHVQASGTLSAPVVSIHPPQLTVQPGQLAEFRCSATGSPTPTLEWTGGPGGQLPAKAQIHGGILRLPAVEPTDQAQYLCRAHSSAGQQVARAVLHVHGGGGPRVQVSPERTQVHAGRTVRLYCRAAGVPSATITWRKEGGSLPPQARSERTDIATLLIPAITTADAGFYLCVATSPAGTAQARIQVVVLSASDASPPPVKIESSSPSVTEGQTLDLNCVVAGSAHAQVTWYRRGGSLPPHTQVHGSRLRLPQVSPADSGEYVCRVENGSGPKEASITVSVLHGTHSGPSYTPVPGSTRPIRIEPSSSHVAEGQTLDLNCVVPGQAHAQVTWHKRGGSLPARHQTHGSLLRLHQVTPADSGEYVCHVVGTSGPLEASVLVTIEASVIPGPIPPVRIESSSSTVAEGQTLDLSCVVAGQAHAQVTWYKRGGSLPARHQVRGSRLYIFQASPADAGQYVCRASNGMEASITVTVTGTQGANLAYPAGSTQPIRIEPSSSQVAEGQTLDLNCVVPGQSHAQVTWHKRGGSLPVRHQTHGSLLRLYQASPADSGEYVCRVLGSSVPLEASVLVTIEPAGSVPALGVTPTVRIESSSSQVAEGQTLDLNCLVAGQAHAQVTWHKRGGSLPARHQVHGSRLRLLQVTPADSGEYVCRVVGSSGTQEASVLVTIQQRLSGSHSQGVAYPVRIESSSASLANGHTLDLNCLVASQAPHTITWYKRGGSLPSRHQIVGSRLRIPQVTPADSGEYVCHVSNGAGSRETSLIVTIQGSGSSHVPSVSPPIRIESSSPTVVEGQTLDLNCVVARQPQAIITWYKRGGSLPSRHQTHGSHLRLHQMSVADSGEYVCRANNNIDALEASIVISVSPSAGSPSAPGSSMPIRIESSSSHVAEGETLDLNCVVPGQAHAQVTWHKRGGSLPSHHQTRGSRLRLHHVSPADSGEYVCRVMGSSGPLEASVLVTIEASGSSAVHVPAPGGAPPIRIEPSSSRVAEGQTLDLKCVVPGQAHAQVTWHKRGGNLPARHQVHGPLLRLNQVSPADSGEYSCQVTGSSGTLEASVLVTIEPSSPGPIPAPGLAQPIYIEASSSHVTEGQTLDLNCVVPGQAHAQVTWYKRGGSLPARHQTHGSQLRLHLVSPADSGEYVCRAASGPGPEQEASFTVTVPPSEGSSYRLRSPVISIDPPSSTVQQGQDASFKCLIHDGAAPISLEWKTRNQELEDNVHISPNGSIITIVGTRPSNHGTYRCVASNAYGVAQSVVNLSVHGPPTVSVLPEGPVWVKVGKAVTLECVSAGEPRSSARWTRISSTPAKLEQRTYGLMDSHAVLQISSAKPSDAGTYVCLAQNALGTAQKQVEVIVDTGAMAPGAPQVQAEEAELTVEAGHTATLRCSATGSPAPTIHWSKLRSPLPWQHRLEGDTLIIPRVAQQDSGQYICNATSPAGHAEATIILHVESPPYATTVPEHASVQAGETVQLQCLAHGTPPLTFQWSRVGSSLPGRATARNELLHFERAAPEDSGRYRCRVTNKVGSAEAFAQLLVQGPPGSLPATSIPAGSTPTVQVTPQLETKSIGASVEFHCAVPSDRGTQLRWFKEGGQLPPGHSVQDGVLRIQNLDQSCQGTYICQAHGPWGKAQASAQLVIQALPSVLINIRTSVQTVVVGHAVEFECLALGDPKPQVTWSKVGGHLRPGIVQSGGVVRIAHVELADAGQYRCTATNAAGTTQSHVLLLVQALPQISMPQEVRVPAGSAAVFPCIASGYPTPDISWSKLDGSLPPDSRLENNMLMLPSVRPQDAGTYVCTATNRQGKVKAFAHLQVPERVVPYFTQTPYSFLPLPTIKDAYRKFEIKITFRPDSADGMLLYNGQKRVPGSPTNLANRQPDFISFGLVGGRPEFRFDAGSGMATIRHPTPLALGHFHTVTLLRSLTQGSLIVGDLAPVNGTSQGKFQGLDLNEELYLGGYPDYGAIPKAGLSSGFIGCVRELRIQGEEIVFHDLNLTAHGISHCPTCRDRPCQNGGQCHDSESSSYVCVCPAGFTGSRCEHSQALHCHPEACGPDATCVNRPDGRGYTCRCHLGRSGLRCEEGVTVTTPSLSGAGSYLALPALTNTHHELRLDVEFKPLAPDGVLLFSGGKSGPVEDFVSLAMVGGHLEFRYELGSGLAVLRSAEPLALGRWHRVSAERLNKDGSLRVNGGRPVLRSSPGKSQGLNLHTLLYLGGVEPSVPLSPATNMSAHFRGCVGEVSVNGKRLDLTYSFLGSQGIGQCYDSSPCERQPCQHGATCMPAGEYEFQCLCRDGFKGDLCEHEENPCQLREPCLHGGTCQGTRCLCLPGFSGPRCQQGSGHGIAESDWHLEGSGGNDAPGQYGAYFHDDGFLAFPGHVFSRSLPEVPETIELEVRTSTASGLLLWQGVEVGEAGQGKDFISLGLQDGHLVFRYQLGSGEARLVSEDPINDGEWHRVTALREGRRGSIQVDGEELVSGRSPGPNVAVNAKGSVYIGGAPDVATLTGGRFSSGITGCVKNLVLHSARPGAPPPQPLDLQHRAQAGANTRPCPS

SEQ ID NO: 280 - protein, 261 aa, Homo sapiens
MGHEQNQGAALLQMLPLLWLLPHSWAVPEAPTPMWPDDLQNHTFLHTVYCQDGSPSVGLSEAYDEDQLFFFDFSQNTRVPRLPEFADWAQEQGDAPAILFDKEFCEWMIQQIGPKLDGKIPVSRGFPIAEVFTLKPLEFGKPNTLVCFVSNLFPPMLTVNWQHHSVPVEGFGPTFVSAVDGLSFQAFSYLNFTPEPSDIFSCIVTHEIDRYTAIAYWVPRNALPSDLLENVLCGVAFGLGVLGIIVGIVLIIYFRKPCSGD

SEQ ID NO: 281 - protein, 269 aa, Homo sapiens
MSWKKALRIPGDLRVATVTLMLAMLSSLLAEGRDSPEDFVFQFKGMCYFTNGTERVRLVTRYIYNREEYARFDSDVGVYRAVTPQGRPDAEYWNSQKEVLEGTRAELDTVCRHNYEVAFRGILQRRVEPTVTISPSRTEALNHHNLLVCSVTDFYPGQIKVRWFRNDQEETAGVVSTPLIRNGDWTFQILVMLEMTPQRGDVYTCHVEHPSLQSPITVEWRAQSESAQSKMLSGVGGFVLGLIFLGLGLIIRQRSQKGPQGPPPAGLLH

SEQ ID NO: 282 - protein, 229 aa, Homo sapiens
MAISGVPVLGFFIIAVLMSAQESWAIKEEHVIIQAEFYLNPDQSGEFMFDFDGDEIFHVDMAKKETVWRLEEFGRFASFEAQGALANIAVDKANLEIMTKRSNYTPITNDKFTPPVVNVTWLRNGKPVTTGVSETVFLPREDHLFRKFHYLPFLPSTEDVYDCRVEHWGLDEPLLKHWEFDAPSPLPETTENVVCALGLTVGLVGIIIGTIFIIKGLRKSNAAERRGPL

SEQ ID NO: 283 - protein, 426 aa, Homo sapiens
MEAAVAAPRPRLLLLVLAAAAAAAAALLPGATALQCFCHLCTKDNFTCVTDGLCFVSVTETTDKVIHNSMCIAEIDLIPRDRPFVCAPSSKTGSVTTTYCCNQDHCNKIELPTTGLPLLVQRTIARTIVLQESIGKGRFGEVWRGKWRGEEVAVKIFSSREERSWFREAEIYQTVMLRHENILGFIAADNKDNGTWTQLWLVSDYHEHGSLFDYLNRYTVTVEGMIKLALSTASGLAHLHMEIVGTQGKPAIAHRDLKSKNILVKKNGTCCIADLGLAVRHDSATDTIDIAPNHRVGTKRYMAPEVLDDSINMKHFESFKRADIYAMGLVFWEIARRCSIGGIHEDYQLPYYDLVPSDPSVEEMRKVVCEQKLRPNIPNRWQSCEALRVMAKIMRECWYANGAARLTALRIKKTLSQLSQQEGIKM

SEQ ID NO: 284 - protein, 503 aa, Homo sapiens
MEAAVAAPRPRLLLLVLAAAAAAAAALLPGATALQCFCHLCTKDNFTCVTDGLCFVSVTETTDKVIHNSMCIAEIDLIPRDRPFVCAPSSKTGSVTTTYCCNQDHCNKIELPTTVKSSPGLGPVELAAVIAGPVCFVCISLMLMVYICHNRTVIHHRVPNEEDPSLDRPFISEGTTLKDLIYDMTTSGSGSGLPLLVQRTIARTIVLQESIGKGRFGEVWRGKWRGEEVAVKIFSSREERSWFREAEIYQTVMLRHENILGFIAADNKDNGTWTQLWLVSDYHEHGSLFDYLNRYTVTVEGMIKLALSTASGLAHLHMEIVGTQGKPAIAHRDLKSKNILVKKNGTCCIADLGLAVRHDSATDTIDIAPNHRVGTKRYMAPEVLDDSINMKHFESFKRADIYAMGLVFWEIARRCSIGGIHEDYQLPYYDLVPSDPSVEEMRKVVCEQKLRPNIPNRWQSCEALRVMAKIMRECWYANGAARLTALRIKKTLSQLSQQEGIKM

SEQ ID NO: 285 - protein, 1123 aa, Homo sapiens
MTVRRLSLLCRDLWALWLLLKAGADEIMHQDIVPLCAADIQDQLKKRFAYLSGGRGQDGSPVITFPDYPAFSEIPDKEFQNVMTYLTSIPSLQDAGIGFILVIDRRRDKWTSVKASVLRIAASFPANLQLVLVLRPTGFFQRTLSDIAFKFNRDDFKMKVPVIMLSSVPDLHGYIDKSQLTEDLGGTLDYCHSRWLCQRTAIESFALMVKQTAQMLQSFGTELAETELPNDVQSTSSVLCAHTEKKDKAKEDLRLALKEGHSVLESLRELQAEGSEPSVNQDQLDNQATVQRLLAQLNETEAAFDEFWAKHQQKLEQCLQLRHFEQGFREVKAILDAASQKIATFTDIGNSLAHVEHLLRDLASFEEKSGVAVERARALSLDGEQLIGNKHYAVDSIRPKCQELRHLCDQFSAEIARRRGLLSKSLELHRRLETSMKWCDEGIYLLASQPVDKCQSQDGAEAALQEIEKFLETGAENKIQELNAIYKEYESILNQDLMEHVRKVFQKQASMEEVFHRRQASLKKLAARQTRPVQPVAPRPEALAKSPCPSPGIRRGSENSSSEGGALRRGPYRRAKSEMSESRQGRGSAGEEEESLAILRRHVMSELLDTERAYVEELLCVLEGYAAEMDNPLMAHLLSTGLHNKKDVLFGNMEEIYHFHNRIFLRELENYTDCPELVGRCFLERMEDFQIYEKYCQNKPRSESLWRQCSDCPFFQECQRKLDHKLSLDSYLLKPVQRITKYQLLLKEMLKYSRNCEGAEDLQEALSSILGILKAVNDSMHLIAITGYDGNLGDLGKLLMQGSFSVWTDHKRGHTKVKELARFKPMQRHLFLHEKAVLFCKKREENGEGYEKAPSYSYKQSLNMAAVGITENVKGDAKKFEIWYNAREEVYIVQAPTPEIKAAWVNEIRKVLTSQLQACREASQHRALEQSQSLPLPAPTSTSPSRGNSRNIKKLEERKTDPLSLEGYVSSAPLTKPPEKGKGWSKTSHSLEAPEDDGGWSSAEEQINSSDAEEDGGLGPKKLVPGKYTVVADHEKGGPDALRVRSGDVVELVQEGDEGLWYVRDPTTGKEGWVPASSLSVRLGPSGSAQCLSSSESSPGSAVLSNSSSCSEGGQAPFSDLQG

SEQ ID NO: 286 - protein, 913 aa, Homo sapiens
MGWGSRCCCPGRLDLLCVLALLGGCLLPVCRTRVYTNHWAVKIAGGFPEANRIASKYGFINIGQIGALKDYYHFYHSRTIKRSVISSRGTHSFISMEPKVEWIQQQVVKKRTKRDYDFSRAQSTYFNDPKWPSMWYMHCSDNTHPCQSDMNIEGAWKRGYTGKNIVVTILDDGIERTHPDLMQNYDALASCDVNGNDLDPMPRYDASNENKHGTRCAGEVAAAANNSHCTVGIAFNAKIGGVRMLDGDVTDMVEAKSVSFNPQHVHIYSASWGPDDDGKTVDGPAPLTRQAFENGVRMGRRGLGSVFVWASGNGGRSKDHCSCDGYTNSIYTISISSTAESGKKPWYLEECSSTLATTYSSGESYDKKIITTDLRQRCTDNHTGTSASAPMAAGIIALALEANPFLTWRDVQHVIVRTSRAGHLNANDWKTNAAGFKVSHLYGFGLMDAEAMVMEAEKWTTVPRQHVCVESTDRQIKTIRPNSAVRSIYKASGCSDNPNRHVNYLEHVVVRITITHPRRGDLAIYLTSPSGTRSQLLANRLFDHSMEGFKNWEFMTIHCWGERAAGDWVLEVYDTPSQLRNFKTPGKLKEWSLVLYGTSVQPYSPTNEFPKVERFRYSRVEDPTDDYGTEDYAGPCDPECSEVGCDGPGPDHCNDCLHYYYKLKNNTRICVSSCPPGHYHADKKRCRKCAPNCESCFGSHGDQCMSCKYGYFLNEETNSCVTHCPDGSYQDTKKNLCRKCSENCKTCTEFHNCTECRDGLSLQGSRCSVSCEDGRYFNGQDCQPCHRFCATCAGAGADGCINCTEGYFMEDGRCVQSCSISYYFDHSSENGYKSCKKCDISCLTCNGPGFKNCTSCPSGYLLDLGMCQMGAICKDATEESWAEGGFCMLVKKNNLCQRKVLQQLCCKTCTFQG

SEQ ID NO: 287 - protein, 690 aa, Homo sapiens
MGWGSRCCCPGRLDLLCVLALLGGCLLPVCRTRVYTNHWAVKIAGGFPEANRIASKYGFINIGQIGALKDYYHFYHSRTIKRSVISSRGTHSFISMEPKVEWIQQQVVKKRTKRDYDFSRAQSTYFNDPKWPSMWYMHCSDNTHPCQSDMNIEGAWKRGYTGKNIVVTILDDGIERTHPDLMQNYDALASCDVNGNDLDPMPRYDASNENKHGTRCAGEVAAAANNSHCTVGIAFNAKIGGVRMLDGDVTDMVEAKSVSFNPQHVHIYSASWGPDDDGKTVDGPAPLTRQAFENGVRMGRRGLGSVFVWASGNGGRSKDHCSCDGYTNSIYTISISSTAESGKKPWYLEECSSTLATTYSSGESYDKKIITTDLRQRCTDNHTGTSASAPMAAGIIALALEANPFLTWRDVQHVIVRTSRAGHLNANDWKTNAAGFKVSHLYGFGLMDAEAMVMEAEKWTTVPRQHVCVESTDRQIKTIRPNSAVRSIYKASGCSDNPNRHVNYLEHVVVRITITHPRRGDLAIYLTSPSGTRSQLLANRLFDHSMEGFKNWEFMTIHCWGERAAGDWVLEVYDTPSQLRNFKTPGKLKEWSLVLYGTSVQPYSPTNEFPKVERFRYSRVEDPTDDYGTEDYAGELASSGTQAKKRQLMHHPTTWENRMEWNGMKWNGMKWNGMEWNGMEWNRIESNRIE

SEQ ID NO: 288 - protein, 343 aa, Homo sapiens
MKTPRMVVMAPRTLFLLLSGALTLTETWAGSHSMRYFSAAVSRPGRGEPRFIAMGYVDDTQFVRFDSDSACPRMEPRAPWVEQEGPEYWEEETRNTKAHAQTDRMNLQTLRGYYNQSEASSHTLQWMIGCDLGSDGRLLRGYEQYAYDGKDYLALNEDLRSWTAADTAAQISKRKCEAANVAEQRRAYLEGTCVEWLHRYLENGKEMLQRADPPKTHVTHHPVFDYEATLRCWALGFYPAEIILTWQRDGEDQTQDVELVETRPAGDGTFQKWAAVVVPSGEEQRYTCHVQHEGLPEPLMLRWKQSSLPTIPIMGIVAGLVVLAAVVTGAAVAAVLWRKKSSD

SEQ ID NO: 289 - protein, 146 aa, Homo sapiens
MAGPLRAPLLLLAILAVALAVSPAAGSSPGKPPRLVGGPMDASVEEEGVRRALDFAVGEYNKASNDMYHSRALQVVRARKQIVAGVNYFLDVELGRTTCTKTQPNLDNCPFHDQPHLKRKAFCSFQIYAVPWQGTMTLSKSTCQDA

SEQ ID NO: 290 - protein, 255 aa, Homo sapiens
MGNSCYNIVATLLLVLNFERTRSLQDPCSNCPAGTFCDNNRNQICSPCPPNSFSSAGGQRTCDICRQCKGVFRTRKECSSTSNAECDCTPGFHCLGAGCSMCEQDCKQGQELTKKGCKDCCFGTFNDQKRGICRPWTNCSLDGKSVLVNGTKERDVVCGPSPADLSPGASSVTPPAPAREPGHSPQIISFFLALTSTALLFLLFFLTLRFSVVKRGRKKLLYIFKQPFMRPVQTTQEEDGCSCRFPEEEEGGCEL

SEQ ID NO: 291 - protein, 1070 aa, Homo sapiens
MSPVRRWGSPCLFPLQLFSLCWVLSVAQSKTVRYSTFEEDAPGTVIGTLAEDLHMKVSGDTSFRLMKQFNSSLLRVREGDGQLTVGDAGLDRERLCGQAPQCVLAFDVVSFSQEQFRLVHVEVEVRDVNDHAPRFPRAQIPVEVSEGAAVGTRIPLEVPVDEDVGANGLQTVRLAEPHSPFRVELQTRADGAQCADLVLLQELDRESQAAYSLELVAQDGGRPPRSATAALSVRVLDANDHSPAFPQGAVAEVELAEDAPVGSLLLDLDAADPDEGPNGDVVFAFGARTPPEARRLFRLDPRSGRLTLAGPVDYERQDTYELDVRAQDRGPGPRAATCKVIVRIRDVNDNAPDIAITPLAAPGAPATSPFAAAAAAAALGGADASSPAGAGTPEAGATSLVPEGAARESLVALVSTSDRDSGANGQVRCALYGHEHFRLQPAYAGSYLVVTAASLDRERIAEYNLTLVAEDRGAPPLRTVRPYTVRVGDENDNAPLFTRPVYEVSVRENNPPGAYLATVAARDRDLGRNGQVTYRLLEAEVGRAGGAVSTYVSVDPATGAIYALRSFDYETLRQLDVRIQASDGGSPQLSSSALVQVRVLDQNDHAPVLVHPAPANGSLEVAVPGRTAKDTVVARVQARDADEGANGELAFELQQQEPREAFAIGRRTGEILLTGDLSQEPPGRVFRALLVISDGGRPPLTTTATVSFVVTAGGGRGPAAPASAGSPERSRPPGSRLGVSGSVLQWDTPLIVIIVLAGSCTLLLAAIIAIATTCNRRKKEVRKGGALREERPGAAGGGASAPGSPEEAARGAGPRPNMFDVLTFPGTGKAPFGSPAADAPPPAVAAAEVPGSEGGSATGESACHFEGQQRLRGAHAEPYGASPGFGKEPAPPVAVWKGHSFNTISGREAEKFSGKDSGKGDSDFNDSDSDISGDALKKDLINHMQSGLWACTAECKILGHSDRCWSPSCSGPNAHPSPHPPAQMSTFCKSTSLPRDPLRRDNYYQAQLPKTVGLQSVYEKVLHRDYDRTVTLLSPPRPGRLPDLQEIGVPLYQSPPGRYLSPKKGANENV

SEQ ID NO: 292 - protein, 890 aa, Homo sapiens
MSRSATLLLCLLGCHVWKAVTKTLREPGAGAQEVTLKVHISDASTHQPVADALIEIFTNQASIASGTSGTDGVAFIKFQYKLGSQLIVTASKHAYVPNSAPWKPIRLPVFSSLSLGLLPERSATLMVYEDVVQIVSGFQGARPQPRVHFQRRALRLPENTSYSDLTAFLTAASSPSEVDSFPYLRGLDGNGTGNSTRHDLTPVTAVSVHLLSSNGTPVLVDGPIYVTVPLATQSSLRHNAYVAAWRFDQKLGTWLKSGLGLVHQEGSQLTWTYIAPQLGYWVAAMSPPIPGPVVTQDITTYHTVFLLAILGGMAFILLVLLCLLLYYCRRKCLKPRQHHRKLQLPAGLESSKRDQSTSMSHINLLFSRRASEFPGPLSVTSHGRPEAPGTKELMSGVHLEMMSPGGEGDLHTPMLKLSYSTSQEFSSREELLSCKEEDKSQISFDNLTPSGTLGKDYHKSVEVFPLKARKSMEREGYESSGNDDYRGSYNTVLSQPLFEKQDREGPASTGSKLTIQEHLYPAPSSPEKEQLLDRRPTECMMSRSVDHLERPTSFPRPGQLICCSSVDQVNDSVYRKVLPALVIPAHYMKLPGDHSYVSQPLVVPADQQLEIERLQAELSNPHAGIFPHPSSQIQPQPLSSQAISQQHLQDAGTREWSPQNASMSESLSIPASLNDAALAQMNSEVQLLTEKALMELGGGKPLPHPRAWFVSLDGRSNAHVRHSYIDLQRAGRNGSNDASLDSGVDMNEPKSARKGRGDALSLQQNYPPVQEHQQKEPRAPDSTAYTQLVYLDDVEQSGSECGTTVCTPEDSALRCLLEGSSRRSGGQLPSLQEETTRRTADAPSEPAASPHQRRSAHEEEEDDDDDDQGEDKKSPWQKREERPLMAFNIK

SEQ ID NO: 293 - protein, 292 aa, Homo sapiens
MREWWVQVGLLAVPLLAAYLHIPPPQLSPALHSWKSSGKFFTYKGLRIFYQDSVGVVGSPEIVVLLHGFPTSSYDWYKIWEGLTLRFHRVIALDFLGFGFSDKPRPHHYSIFEQASIVEALLRHLGLQNRRINLLSHDYGDIVAQELLYRYKQNRSGRLTIKSLCLSNGGIFPETHRPLLLQKLLKDGGVLSPILTRLMNFFVFSRGLLQYINQRKKFRRRWVGALASVTIPIHFIYGPLDPVNPYPEFLELYRKTLPRSTVSILDDHISHYPQLEDPMGFLNAYMGFINSF

SEQ ID NO: 294 - protein, 1299 aa, Homo sapiens
MPKKKRLSAGRVPLILFLCQMISALEVPLDPKLLEDLVQPPTITQQSPKDYIIDPRENIVIQCEAKGKPPPSFSWTRNGTHFDIDKDPLVTMKPGTGTLIINIMSEGKAETYEGVYQCTARNERGAAVSNNIVVRPSRSPLWTKEKLEPITLQSGQSLVLPCRPPIGLPPPIIFWMDNSFQRLPQSERVSQGLNGDLYFSNVLPEDTREDYICYARFNHTQTIQQKQPISVKVISVDELNDTIAANLSDTEFYGAKSSRERPPTFLTPEGNASNKEELRGNVLSLECIAEGLPTPIIYWAKEDGMLPKNRTVYKNFEKTLQIIHVSEADSGNYQCIAKNALGAIHHTISVRVKAAPYWITAPQNLVLSPGEDGTLICRANGNPKPRISWLTNGVPIEIAPDDPSRKIDGDTIIFSNVQERSSAVYQCNASNEYGYLLANAFVNVLAEPPRILTPANTLYQVIANRPALLDCAFFGSPLPTIEWFKGAKGSALHEDIYVLHENGTLEIPVAQKDSTGTYTCVARNKLGMAKNEVHLEIKDPTWIVKQPEYAVVQRGSMVSFECKVKHDHTLSLTVLWLKDNRELPSDERFTVDKDHLVVADVSDDDSGTYTCVANTTLDSVSASAVLSVVAPTPTPAPVYDVPNPPFDLELTDQLDKSVQLSWTPGDDNNSPITRIHHEYEDAMHKPGLWHHQTEVSGTQTTAQLKLSPYVNYSFRVMAVNSIGKSLPSEASEQYLTKASEPDKNPTAVEGLGSEPDNLVITWKPLNGFESNGPGLQYKVSWRQKDGDDEWTSVVVANVSKYIVSGTPTFVPYLIKVQALNDMGFAPEPAVVMGHSGEDLPMVAPGNVRVNVVNSTLAEVHWDPVPLKSIRGHLQGYRIYYWKTQSSSKRNRRHIEKKILTFQGSKTHGMLPGLEPFSHYTLNVRVVNGKGEGPASPDRVFNTPEGVPSAPSSLKIVNPTLDSLTLEWDPPSHPNGILTEYTLKYQPINSTHELGPLVDLKIPANKTRWTLKNLNFSTRYKFYFYAQTSAGSGSQITEEAVTTVDEAGILPPDVGAGKVQAVNPRISNLTAAAAETYANISWEYEGPEHVNFYVEYGVAGSKEEWRKEIVNGSRSFFGLKGLMPGTAYKVRVGAVGDSGFVSSEDVFETGPAMASRQVDIATQGWFIGLMCAVALLILILLIVCFIRRNKGGKYPVKEKEDAHADPEIQPMKEDDGTFGEYSDAEDHKPLKKGSRTPSDRTVKKEDSDDSLVDYGEGVNGQFNEDGSFIGQYSGKKEKEPAEGNESSEAPSPVNAMNSFV

SEQ ID NO: 295 - protein, 1192 aa, Homo sapiens
MQLKIMPKKKRLSAGRVPLILFLCQMISALEVPLDPKLLEDLVQPPTITQQSPKDYIIDPRENIVIQCEAKGKPPPSFSWTRNGTHFDIDKDPLVTMKPGTGTLIINIMSEGKAETYEGVYQCTARNERGAAVSNNIVVRPSRSPLWTKEKLEPITLQSGQSLVLPCRPPIGLPPPIIFWMDNSFQRLPQSERVSQGLNGDLYFSNVLPEDTREDYICYARFNHTQTIQQKQPISVKVISAKSSRERPPTFLTPEGNASNKEELRGNVLSLECIAEGLPTPIIYWAKEDGMLPKNRTVYKNFEKTLQIIHVSEADSGNYQCIAKNALGAIHHTISVRVKAAPYWITAPQNLVLSPGEDGTLICRANGNPKPRISWLTNGVPIEIAPDDPSRKIDGDTIIFSNVQERSSAVYQCNASNEYGYLLANAFVNVLAEPPRILTPANTLYQVIANRPALLDCAFFGSPLPTIEWFKGAKGSALHEDIYVLHENGTLEIPVAQKDSTGTYTCVARNKLGMAKNEVHLEIKDPTWIVKQPEYAVVQRGSMVSFECKVKHDHTLSLTVLWLKDNRELPSDERFTVDKDHLVVADVSDDDSGTYTCVANTTLDSVSASAVLSVVAPTPTPAPVYDVPNPPFDLELTDQLDKSVQLSWTPGDDNNSPITKFIIEYEDAMHKPGLWHHQTEVSGTQTTAQLKLSPYVNYSFRVMAVNSIGKSLPSEASEQYLTKASEPDKNPTAVEGLGSEPDNLVITWKPLNGFESNGPGLQYKVSWRQKDGDDEWTSVVVANVSKYIVSGTPTFVPYLIKVQALNDMGFAPEPAVVMGHSGEDLPMVAPGNVRVNVVNSTLAEVHWDPVPLKSIRGHLQGYRIYYWKTQSSSKRNRRHIEKKILTFQGSKTHGMLPGLEPFSHYTLNVRVVNGKGEGPASPDRVFNTPEGVPSAPSSLKIVNPTLDSLTLEWDPPSHPNGILTEYTLKYQPINSTHELGPLVDLKIPANKTRWTLKNLNFSTRYKFYFYAQTSAGSGSQITEEAVTTVDEAGILPPDVGAGKAMASRQVDIATQGWFIGLMCAVALLILILLIVCFIRRNKGGKYPVKEKEDAHADPEIQPMKEDDGTFGEYSDAEDHKPLKKGSRTPSDRTVKKEDSDDSLVDYGEGVNGQFNEDGSFIGQYSGKKEKEPAEGNESSEAPSPVNAMNSFV

SEQ ID NO: 296 - protein, 1304 aa, Homo sapiens
MQLKIMPKKKRLSAGRVPLILFLCQMISALEVPLDPKLLEDLVQPPTITQQSPKDYIIDPRENIVIQCEAKGKPPPSFSWTRNGTHFDIDKDPLVTMKPGTGTLIINIMSEGKAETYEGVYQCTARNERGAAVSNNIVVRPSRSPLWTKEKLEPITLQSGQSLVLPCRPPIGLPPPIIFWMDNSFQRLPQSERVSQGLNGDLYFSNVLPEDTREDYICYARFNHTQTIQQKQPISVKVISVDELNDTIAANLSDTEFYGAKSSRERPPTFLTPEGNASNKEELRGNVLSLECIAEGLPTPIIYWAKEDGMLPKNRTVYKNFEKTLQIIHVSEADSGNYQCIAKNALGAIHHTISVRVKAAPYWITAPQNLVLSPGEDGTLICRANGNPKPRISWLTNGVPIEIAPDDPSRKIDGDTIIFSNVQERSSAVYQCNASNEYGYLLANAFVNVLAEPPRILTPANTLYQVIANRPALLDCAFFGSPLPTIEWFKGAKGSALHEDIYVLHENGTLEIPVAQKDSTGTYTCVARNKLGMAKNEVHLEIKDPTWIVKQPEYAVVQRGSMVSFECKVKHDHTLSLTVLWLKDNRELPSDERFTVDKDHLVVADVSDDDSGTYTCVANTTLDSVSASAVLSVVAPTPTPAPVYDVPNPPFDLELTDQLDKSVQLSWTPGDDNNSPITKFIIEYEDAMHKPGLWHHQTEVSGTQTTAQLKLSPYVNYSFRVMAVNSIGKSLPSEASEQYLTKASEPDKNPTAVEGLGSEPDNLVITWKPLNGFESNGPGLQYKVSWRQKDGDDEWTSVVVANVSKYIVSGTPTFVPYLIKVQALNDMGFAPEPAVVMGHSGEDLPMVAPGNVRVNVVNSTLAEVHWDPVPLKSIRGHLQGYRIYYWKTQSSSKRNRRHIEKKILTFQGSKTHGMLPGLEPFSHYTLNVRVVNGKGEGPASPDRVFNTPEGVPSAPSSLKIVNPTLDSLTLEWDPPSHPNGILTEYTLKYQPINSTHELGPLVDLKIPANKTRWTLKNLNFSTRYKFYFYAQTSAGSGSQITEEAVTTVDEAGILPPDVGAGKVQAVNPRISNLTAAAAETYANISWEYEGPEHVNFYVEYGVAGSKEEWRKEIVNGSRSFFGLKGLMPGTAYKVRVGAVGDSGFVSSEDVFETGPAMASRQVDIATQGWFIGLMCAVALLILILLIVCFIRRNKGGKYPVKEKEDAHADPEIQPMKEDDGTFGEYSDAEDHKPLKKGSRTPSDRTVKKEDSDDSLVDYGEGVNGQFNEDGSFIGQYSGKKEKEPAEGNESSEAPSPVNAMNSFV

SEQ ID NO: 297 - protein, 205 aa, Homo sapiens
MSRGLQLLLLSCAYSLAPATPEVKVACSEDVDLPCTAPWDPQVPYTVSWVKLLEGGEERMETPQEDHLRGQHYHQKGQNGSFDAPNERPYSLKIRNTTSCNSGTYRCTLQDPDGQRNLSGKVILRVTGCPAQRKEETFKKYRAEIVLLLALVIFYLTLIIFTCKFARLQSIFPDFSKAGMERAFLPVTSPNKHLGLVTPHKTELV

SEQ ID NO: 298 - protein, 277 aa, Homo sapiens
MCVGARRLGRGPCAALLLLGLGLSTVTGLHCVGDTYPSNDRCCHECRPGNGMVSRCSRSQNTVCRPCGPGFYNDVVSSKPCKPCTWCNLRSGSERKQLCTATQDTVCRCRAGTQPLDSYKPGVDCAPCPPGHFSPGDNQACKPWTNCTLAGKHTLQPASNSSDAICEDRDPPATQPQETQGPPARPITVQPTEAWPRTSQGPSTRPVEVPGGRAVAAILGLGLVLGLLGPLAILLALYLLRRDQRLPPDAHKPPGGGSFRTPIQEEQADAHSTLAKI

SEQ ID NO: 299 - protein, 234 aa, Homo sapiens
MAQHGAMGAFRALCGLALLCALSLGQRPTGGPGCGPGRLLLGTGTDARCCRVHTTRCCRDYPGEECCSEWDCMCVQPEFHCGDPCCTTCRHHPCPPGQGVQSQGKFSFGFQCIDCASGTFSGGHEGHCKPWTDCTQFGFLTVFPGNKTHNAVCVPGSPPAEPLGWLTVVLLAVAACVLLLTSAQLGLHIWQLRKTQLLLEVPPSTEDARSCQFPEEERGERSAEEKGRLGDLWV

SEQ ID NO: 300 - protein, 241 aa, Homo sapiens
MAQHGAMGAFRALCGLALLCALSLGQRPTGGPGCGPGRLLLGTGTDARCCRVHTTRCCRDYPGEECCSEWDCMCVQPEFHCGDPCCTTCRHHPCPPGQGVQSQGKFSFGFQCIDCASGTFSGGHEGHCKPWTDCTQFGFLTVFPGNKTHNAVCVPGSPPAEPLGWLTVVLLAVAACVLLLTSAQLGLHIWQLRSQCMWPRETQLLLEVPPSTEDARSCQFPEEERGERSAEEKGRLGDLWV

SEQ ID NO: 301 - protein, 456 aa, Homo sapiens
MGITLIWCLALVLIKWITSKRRGAISYDSSDQTALYIRMLGDVRVRSRAGFESERRGSHPYIDFRIFHSQSEIEVSVSARNIRRLLSFQRYLRSSRFFRGTAVSNSLNILDDDYNGQAKCMLEKVGNWNFDIFLFDRLTNGNSLVSLTFHLFSLHGLIEYFHLDMMKLRRFLVMIQEDYHSQNPYHNAVHAADVTQAMHCYLKEPKLANSVTPWDILLSLIAAATHDLDHPGVNQPFLIKTNHYLATLYKNTSVLENHHWRSAVGLLRESGLFSHLPLESRQQMETQIGALILATDISRQNEYLSLFRSHLDRGDLCLEDTRHRHLVLQMALKCADICNPCRTWELSKQWSEKVTEEFFHQGDIEKKYHLGVSPLCDRHTESIANIQIGFMTYLVEPLFTEWARFSNTRLSQTMLGHVGLNKASWKGLQREQSSSEDTDAAFELNSQLLPQENRLS

SEQ ID NO: 302 - protein, 529 aa, Homo sapiens
MAALTTVVVAAAATAVAGAVAGAGAATGTGVGATPAPQQSDGCFSTSGGIRPFHLQNWKQKVNQTKKAEFVRTAEKFKNQVINMEKDKHSHFYNQKSDFRIEHSMLEELENKLIHSRKTERAKIQQQLAKIHNNVKKLQHQLKDVKPTPDFVEKLREMMEEIENAINTFKEEQRLIYEELIKEEKTTNNELSAISRKIDTWALGNSETEKAFRAISSKVPVDKVTPSTLPEEVLDFEKFLQQTGGRQGAWDDYDHQNFVKVRNKHKGKPTFMEEVLEHLPGKTQDEVQQHEKWYQKFLALEERKKESIQIWKTKKQQKREEIFKLKEKADNTPVLFHNKQEDNQKQKEEQRKKQKLAVEAWKKQKSIEMSMKCASQLKEEEEKEKKHQKERQRQFKLKLLLESYTQQKKEQEEFLRLEKEIREKAEKAEKRKNAADEISRFQERDLHKLELKILDRQAKEDEKSQKQRRLAKLKEKVENNVSRDPSRLYKPTKGWEERTKKIGPTGSGPLLHIPHRAIPTWRQGIQRRV

SEQ ID NO: 303 - protein, 655 aa, Homo sapiens
MGSGARFPSGTLRVRWLLLLGLVGPVLGAARPGFQQTSHLSSYEIITPWRLTRERREAPRPYSKQVSYVIQAEGKEHIIHLERNKDLLPEDFVVYTYNKEGTLITDHPNIQNHCHYRGYVEGVHNSSIALSDCFGLRGLLHLENASYGIEPLQNSSHFEHIIYRMDDVYKEPLKCGVSNKDIEKETAKDEEEEPPSMTQLLRRRRAVLPQTRYVELFIVVDKERYDMMGRNQTAVREEMILLANYLDSMYIMLNIRIVLVGLEIWTNGNLINIVGGAGDVLGNFVQWREKFLITRRRHDSAQLVLKKGFGGTAGMAFVGTVCSRSHAGGINVFGQITVETFASIVAHELGHNLGMNHDDGRDCSCGAKSCIMNSGASGSRNFSSCSAEDFEKLTLNKGGNCLLNIPKPDEAYSAPSCGNKLVDAGEECDCGTPKECELDPCCEGSTCKLKSFAECAYGDCCKDCRFLPGGTLCRGKTSECDVPEYCNGSSQFCQPDVFIQNGYPCQNNKAYCYNGMCQYYDAQCQVIFGSKAKAAPKDCFIEVNSKGDRFGNCGFSGNEYKKCATGNALCGKLQCENVQEIPVFGIVPAIIQTPSRGTKCWGVDFQLGSDVPDPGMVNEGTKCGAGKICRNFQCVDASVLNYDCDVQKKCHGHGK

SEQ ID NO: 304 - protein, 200 aa, Homo sapiens
MDSYLLMWGLLTFIMVPGCQAELCDDDPPEIPHATFKAMAYKEGTMLNCECKRGFRRIKSGSLYMLCTGNSSHSSWDNQCQCTSSATRNTTKQVTPQPEEQKERKTTEMQSPMQPVDQASLPGEEKPQASPEGRPESETSCLVTTTDFQIQTEMAATMETSIFTTEYQVAVAGCVFLLISVLLLSGLTWQRRQRKSRRTI

SEQ ID NO: 305 - protein, 272 aa, Homo sapiens
MDSYLLMWGLLTFIMVPGCQAELCDDDPPEIPHATFKAMAYKEGTMLNCECKRGFRRIKSGSLYMLCTGNSSHSSWDNQCQCTSSATRNTTKQVTPQPEEQKERKTTEMQSPMQPVDQASLPGHCREPPPWENEATERIYHFVVGQMVYYQCVQGYRALHRGPAESVCKMTHGKTRWTQPQLICTGEMETSQFPGEEKPQASPEGRPESETSCLVTTTDFQIQTEMAATMETSIFTTEYQVAVAGCVFLLISVLLLSGLTWQRRQRKSRRTI

SEQ ID NO: 306 - protein, 536 aa, Homo sapiens
MLLLWVSVVAALALAVLAPGAGEQRRRAAKAPNVVLVVSDSFDGRLTFHPGSQVVKLPFINFMKTRGTSFLNAYTNSPICCPSRAAMWSGLFTHLTESWNNFKGLDPNYTTWMDVMERHGYRTQKFGKLDYTSGHHSISNRVEAWTRDVAFLLRQEGRPMVNLIRNRTKVRVMERDWQNTDKAVNWLRKEAINYTEPFVIYLGLNLPHPYPSPSSGENFGSSTFHTSLYWLEKVSHDAIKIPKWSPLSEMHPVDYYSSYTKNCTGRFTKKEIKNIRAFYYAMCAETDAMLGEIILALHQLDLLQKTIVIYSSDHGELAMEHRQFYKMSMYEASAHVPLLMMGPGIKAGLQVSNVVSLVDIYPTMLDIAGIPLPQNLSGYSLLPLSSETFKNEHKVKNLHPPWILSEFHGCNVNASTYMLRTNHWKYIAYSDGASILPQLFDLSSDPDELTNVAVKFPEITYSLDQKLHSIINYPKVSASVHQYNKEQFIKWKQSIGQNYSNVIANLRWHQDWQKEPRKYENAIDQWLKTHMNPRAV

SEQ ID NO: 307 - protein, 327 aa, Homo sapiens
MRLAVLFSGALLGLLAESTGTTSHRTTKSHKTTTHRTTTTGTTSHGPTTATHNPTTTSHGNVTVHPTSNSTATSQGPSTATHSPATTSHGNATVHPTSNSTATSPGFTSSAHPEPPPPSPSPSPTSKETIGDYTWTNGSQPCVHLQAQIQIRVMYTTQGGGEAWGISVLNPNKTKVQGSCEGAHPHLLLSFPYGHLSFGFMQDLQQKVVYLSYMAVEYNVSFPHAAQWTFSAQNASLRDLQAPLGQSFSCSNSSIILSPAVHLDLLSLRLQAAQLPHTGVFGQSFSCPSDRSILLPLIIGLILLGLLALVLIAFCIIRRRPSAYQAL

SEQ ID NO: 308 - protein, 554 aa, Homo sapiens
MPLPWSLALPLLLSWVAGGFGNAASARHHGLLASARQPGVCHYGTKLACCYGWRRNSKGVCEATCEPGCKFGECVGPNKCRCFPGYTGKTCSQDVNECGMKPRPCQHRCVNTHGSYKCFCLSGHMLMPDATCVNSRTCAMINCQYSCEDTEEGPQCLCPSSGLRLAPNGRDCLDIDECASGKVICPYNRRCVNTFGSYYCKCHIGFELQYISGRYDCIDINECTMDSHTCSHHANCFNTQGSFKCKCKQGYKGNGLRCSAIPENSVKEVLRAPGTIKDRIKKLLAHKNSMKKKAKIKNVTPEPTRTPTPKVNLQPFNYEEIVSRGGNSHGGKKGNEEKMKEGLEDEKREEKALKNDIEERSLRGDVFFPKVNEAGEFGLILVQRKALTSKLEHKADLNISVDCSFNHGICDWKQDREDDFDWNPADRDNAIGFYMAVPALAGHKKDIGRLKLLLPDLQPQSNFCLLFDYRLAGDKVGKLRVFVKNSNNALAWEKTTSEDEKWKTGKIQLYQGTDATKSIIFEAERGKGKTGEIAVDGVLLVSGLCPDSLLSVDD

SEQ ID NO: 309 - protein, 271 aa, Homo sapiens
MGSLFPLSLLFFLAAAYPGVGSALGRRTKRAQSPKGSPLAPSGTSVPFWVRMSPEFVAVQPGKSVQLNCSNSCPQPQNSSLRTPLRQGKTLRGPGWVSYQLLDVRAWSSLAHCLVTCAGKTRWATSRITAYKPPHSVILEPPVLKGRKYTLRCHVTQVFPVGYLVVTLRHGSRVIYSESLERFTGLDLANVTLTYEFAAGPRDFWQPVICHARLNLDGLVVRNSSAPITLMLAWSPAPTALASGSIAALVGILLTVGAAYLCKCLAMKSQA

SEQ ID NO: 310 - protein, 297 aa, Homo sapiens
MQRARPTLWAAALTLLVLLRGPPVARAGASSAGLGPVVRCEPCDARALAQCAPPPAVCAELVREPGCGCCLTCALSEGQPCGIYTERCGSGLRCQPSPDEARPLQALLDGRGLCVNASAVSRLRAYLLPAPPAPGEPPAPGNASESEEDRSAGSVESPSVSSTHRVSDPKFHPLHSKIIIIKKGHAKDSQRYKVDYESQSTDTQNFSSESKRETEYGPCRREMEDTLNHLKFLNVLSPRGVHIPNCDKKGFYKKKQCRPSKGRKRGFCWCVDKYGQPLPGYTTKGKEDVHCYSMQSK

SEQ ID NO: 311 - protein, 300 aa, Homo sapiens
MVLLWLTLLLIALPCLLQTKEGGKPWAGAENLTCWIHDVDFLSCSWAVGPGAPADVQYDLYLNVANRRQQYECLHYKTDAQGTRIGCRFDDISRLSSGSQSSHILVRGRSAAFGIPCTDKFVVFSQIEILTPPNMTAKCNKTHSFMHWKMRSHFNRKFRYELQIQKRMQPVITEQVRDRTSFQLLNPGTYTVQIRARERVYEFLSAWSTPQRFECDQEEGANTRAWRTSLLIALGTLLALVCVFVICRRYLVMQRLFPRIPHMKDPIGDSFQNDKLVVWEAGKAGLEECLVTEVQVVQKT

SEQ ID NO: 312 - protein, 176 aa, Homo sapiens
MRIFAVFIFMTYWHLLNAPYNKINQRILVVDPVTSEHELTCQAEGYPKAEVIWTSSDHQVLSGKTTTTNSKREEKLFNVTSTLRINTTTNEIFYCTFRRLDPEENHTAELVIPELPLAHPPNERTHLVILGAILLCLGVALTFIFRLRKGRMMDVKKCGIQDTNSKKQSDTHLEET

SEQ ID NO: 313 - protein, 290 aa, Homo sapiens
MRIFAVFIFMTYWHLLNAFTVTVPKDLYVVEYGSNMTIECKFPVEKQLDLAALIVYWEMEDKNIIQFVHGEEDLKVQHSSYRQRARLLKDQLSLGNAALQITDVKLQDAGVYRCMISYGGADYKRITVKVNAPYNKINQRILVVDPVTSEHELTCQAEGYPKAEVIWTSSDHQVLSGKTTTTNSKREEKLFNVTSTLRINTTTNEIFYCTFRRLDPEENHTAELVIPELPLAHPPNERTHLVILGAILLCLGVALTFIFRLRKGRMMDVKKCGIQDTNSKKQSDTHLEET

SEQ ID NO: 314 - protein, 356 aa, Homo sapiens
MRPTLLWSLLLLLGVFAAAAAAPPAQLTLETYQEWCNDSAATHDPLSQLPAPQHPKIRLYNAEQVLSWEPVALSNSTRPVVYQVQFKYTDSKWFTADIMSIGVNCTQITATECDFTAASPSAGFPMDFNVTLRLRAELGALHSAWVTMPWFQHYRNVTVGPPENIEVTPGEGSLIIRFSSPFDIADTSTAFFCYYVHYWEKGGIQQVKGPFRSNSISLDNLKPSRVYCLQVQAQLLWNKSNIFRVGHLSNISCYETMADASTELQQVILISVGTFSLLSVLAGACFFLVLKYRGLIKYWFHTPPSIPLQIEEYLKDPTQPILEALDKDSSPKDDVWDSVSIISFPEKEQEDVLQTL

SEQ ID NO: 315 - protein, 202 aa, Homo sapiens
MQPILLLLAFLLLPRADAGEIIGGHEAKPHSRPYMAYLMIWDQKSLKRCGGFLIRDDFVLTAAHCWGRLERKAKRTRAVQPLRLPSNKAQVKPGQTCSVAGWGQTAPLGKHSHTLQEVKMTVQEDRKCESDLRHYYDSTIELCVGDPEIKKTSFKGDSGGPLVCNKVAQGIVSYGRNNGMPPRACTKVSSFVHWIKKTMKRY

SEQ ID NO: 316 - protein, 202 aa, Homo sapiens; identical to SEQ ID NO: 315

SEQ ID NO: 317 - protein, 160 aa, Homo sapiens
MQPFLLLLAFLLTPGAGTEEIIGGHEAKPHSRPYMAFVQFLQEKSRKRCGGILVRKDFVLTAAHCQGSSINVTLGAHNIKEQERTQQFIPVKRPIPHPAYNPKNFSNDIMLLQGDSGGPLVCKDVAQGILSYGNKKGTPPGVYIKVSHFLPWIKRTMKRL

SEQ ID NO: 318 - protein, 256 aa, Homo sapiens
MGHTRRQGTSPSKCPYLNFFQLLVLAGLSHFCSGVIHVTKEVKEVATLSCGHNVSVEELAQTRIYWQKEKKMVLTMMSGDMNIWPEYKNRTIFDITNNLSIVILALRPSDEGTYECVVLKYEKDAFKREHLAEVTLSVKADFPTPSISDFEIPTSNIRRIICSTSGGFPEPHLSWLENGEELNAINTTVSQDPETELYAVSSKLDFNMTTNHSFMCLIKYGHLRVNQTFNWNTSFAPRCRERRRNERLRRESVRPV

SEQ ID NO: 319 - protein, 244 aa, Homo sapiens
MRWCLLLIWAQGLRQAPLASGMMTGTIETTGNISAEKGGSIILQCHLSSTTAQVTQVNWEQQDQLLAICNADLGWHISPSFKDRVAPGPGLGLTLQSLTVNDTGEYFCIYHTYPDGTYTGRIFLEVLESSVAEHGARFQIPLLGAMAATLVVICTAVIVVVALTRKKKALRIHSVEGDLRRKSAGQEEWSPSAPSPPGSCVQAEAAPAGLCGEQRGEDCAELHDYFNVLSYRSLGNCSFFTETG

SEQ ID NO: 320 - protein, 445 aa, Homo sapiens
MTGSSFSLAHLLIISGLLCYSAGCLALPSLDQKKRGGHKACCLLTPPPPPLFPPPFFRGGRSPLLSPDMKNLMLELETSQSPCMQGSLGSPGPPGPQGPPGLPGKTGPKGEKGELGRPGRKGRPGPPGVPGMPGPIGWPGPEGPRGEKGDLGMMGLPGSRGPMGSKGYPGSRGEKGSRGEKGDLGPKGEKGFPGFPGMLGQKGEMGPKGEPGIAGHRGPTGRPGKRGKQGQKGDSGVMGPPGKPGPSGQPGRPGPPGPPPAGQLIMGPKGERGFPGPPGRCLCGPTMNVNNPSYGESVYGPSSPRVPVIFVVNNQEELERLNTQNAIAFRRDQRSLYFKDSLGWLPIQLTPFYPVDYTADQHGTCGDGLLQPGEECDDGNSDVGDDCIRCHRAYCGDGHRHEGVEDCDGSDFGYLTCETYLPGSYGDLQCTQYCYIDSTPCRYFT

SEQ ID NO: 321 - protein, 402 aa, Homo sapiens
MPLQLLLLLILLGPGNSLQLWDTWADEAEKALGPLLARDRRQATEYEYLDYDFLPETEPPEMLRNSTDTTPLTGPGTPESTTVEPAARRSTGLDAGGAVTELTTELANMGNLSTDSAAMEIQTTQPAATEAQTTPLAATEAQTTRLTATEAQTTPLAATEAQTTPPAATEAQTTQPTGLEAQTTAPAAMEAQTTAPAAMEAQTTPPAAMEAQTTQTTAMEAQTTAPEATEAQTTQPTATEAQTTPLAAMEALSTEPSATEALSMEPTTKRGLFIPFSVSSVTHKGIPMAASNLSVNYPVGAPDHISVKQCLLAILILALVATIFFVCTVVLAVRLSRKGHMYPVRNYSPTEMVCISSLLPDGGEGPSATANGGLSKAKSPGLTPEPREDREGDDLTLHSFLP

SEQ ID NO: 322 - protein, 1161 aa, Homo sapiens
MTFGTVLLLSVLASYHGFNLDVEEPTIFQEDAGGFGQSVVQFGGSRLVVGAPLEVVAANQTGRLYDCAAATGMCQPIPLHIRPEAVNMSLGLTLAASTNGSRLLACGPTLHRVCGENSYSKGSCLLLGSRWEIIQTVPDATPECPHQEMDIVFLIDGSGSIDQNDFNQMKGFVQAVMGQFEGTDTLFALMQYSNLLKIHFTFTQFRTSPSQQSLVDPIVQLKGLTFTATGILTVVTQLFHHKNGARKSAKKILIVITDGQKYKDPLEYSDVIPQAEKAGIIRYAIGVGHAFQGPTARQELNTISSAPPQDHVFKVDNFAALGSIQKQLQEKIYAVEGTQSRASSSFQHEMSQEGFSTALTMDGLFLGAVGSFSWSGGAFLYPPNMSPTFINMSQENVDMRDSYLGYSTELALWKGVQNLVLGAPRYQHTGKAVIFTQVSRQWRKKAEVTGTQIGSYFGASLCSVDVDSDGSTDLILIGAPHYYEQTRGGQVSVCPLPRGRVQWQCDAVLRGEQGHPWGRFGAALTVLGDVNEDKLIDVAIGAPGEQENRGAVYLFHGASESGISPSHSQRIASSQLSPRLQYFGQALSGGQDLTQDGLMDLAVGARGQVLLLRSLPVLKVGVAMRFSPVEVAKAVYRCWEEKPSALEAGDATVCLTIQKSSLDQLGDIQSSVRFDLALDPGRLTSRAIFNETKNPTLTRRKTLGLGIHCETLKLLLPDCVEDVVSPIILHLNFSLVREPIPSPQNLRPVLAVGSQDLFTASLPFEKNCGQDGLCEGDLGVTLSFSGLQTLTVGSSLELNVIVTVWNAGEDSYGTVVSLYYPAGLSHRRVSGAQKQPHQSALRLACETVPTEDEGLRSSRCSVNHPIFHEGSNGTFIVTFDVSYKATLGDRMLMRASASSENNKASSSKATFQLELPVKYAVYTMISRQEESTKYFNFATSDEKKMKEAEHRYRVNNLSQRDLAISINFWVPVLLNGVAVWDVVMEAPSQSLPCVSERKPPQHSDFLTQISRSPMLDCSIADCLQFRCDVPSFSVQEELDFTLKGNLSFGWVRETLQKKVLVVSVAEITFDTSVYSQLPGQEAFMRAQMEMVLEEDEVYNAIPIIMGSSVGALLLLALITATLYKLGFFKRHYKEMLEDKPEDTATFSGDDFSCVAPNVPLS

SEQ ID NO: 323 - protein, 986 aa, Homo sapiens
MGPPLPLLLLLLLLLPPRVLPAAPSSVPRGRQLPGRLGCLLEEGLCGASEACVNDGVFGRCQKVPAMDFYRYEVSPVALQRLRVALQKLSGTGFTWQDDYTQYVMDQELADLPKTYLRRPEASSPARPSKHSVGSERRYSREGGAALANALRRHLPFLEALSQAPASDVLARTHTAQDRPPAEGDDRFSESILTYVAHTSALTYPPGSRTQLREDLLPRTLGQLQPDELSPKVDSGVDRHHLMAALSAYAAQRPPAPPGEGSLEPQYLLRAPSRMPRPLLAPAAPQKWPSPLGDSEDPSSTGDGARIHTLLKDLQRQPAEVRGLSGLELDGMAELMAGLMQGVDHGVARGSPGRAALGESGEQADGPKATLRGDSFPDDGVQDDDDRLYQEVHRLSATLGGLLQDHGSRLLPGALPFARPLDMERKKSEHPESSLSSEEETAGVENVKSQTYSKDLLGQQPHSEPGAAAFGELQNQMPGPSKEEQSLPAGAQEALSDGLQLEVQPSEEEARGYIVTDREVLGPAVTFKVSANVQNVTTEDVEKATVDNKDKLEETSGLKILQTGVGSKSKLKFLPPQAEQEDSTKFIALTLVSLACILGVLLASGLIYCLRHSSQHRLKEKLSGLGGDPGADATAAYQELCRQRMATRPPDRPEGPHTSRISSVSSQFSDGPIPSPSARSSASSWSEEPVQSNMDISTGHMILSYMEDHLKNKNRLEKEWEALCAYQAEPNSSFVAQREENVPKNRSLAVLTYDHSRVLLKAENSHSHSDYINASPIMDHDPRNPAYIATQGPLPATVADFWQMVWESGCVVIVMLTPLAENGVRQCYHYWPDEGSNLYHIYEVNLVSEHIWCEDFLVRSFYLKNLQTNETRTVTQFHFLSWYDRGVPSSSRSLLDFRRKVNKCYRGRSCPIIVHCSDGAGRSGTYVLIDMVLNKMAKGAKEIDIAATLEHLRDQRPGMVQTKEQFEFALTAVAEEVNAILKALPQ

SEQ ID NO: 324 - protein, 998 aa, Homo sapiens
MGPPLPLLLLLLLLLPPRVLPAAPSSVPRGRQLPGRLDGVFGRCQKVPAMDFYRYEVSPVALQRLRVALQKLSGTGFTWQDDYTQYVMDQELADLPKTYLRRPEASSPARPSKHSVGSERRYSREGGAALANALRRHLPFLEALSQAPASDVLARTHTAQDRPPAEGDDRFSESILTYVAHTSALTYPPGSRTQLREDLLPRTLGQLQPDELSPKVDSGVDRHHLMAALSAYAAQRPPAPPGEGSLEPQYLLRAPSRMPRPLLAPAAPQKWPSPLGDSEDPSSTGDGARIHTLLKDLQRQPAEVRGLSGLELDGMAELMAGLMQGVDHGVARGSPGRAALGESGEQADGPKATLRGDSFPDDGVQDDDDRLYQEVHRLSATLGGLLQDHGSRLLPGALPFARPLDMERKKSEHPESSLSSEEETAGVENVKSQTYSKDLLGQQPHSEPGAAAFGELQNQMPGPSKEEQSLPAGAQEALSDGLQLEVQPSEEEARGYIVTDRDPLRPEEGRRLVEDVARLLQVPSSAFADVEVLGPAVTFKVSANVQNVTTEDVEKATVDNKDKLEETSGLKILQTGVGSKSKLKFLPPQAEQEDSTKFIALTLVSLACILGVLLASGLIYCLRHSSQHRLKEKLSGLGGDPGADATAAYQELCRQRMATRPPDRPEGPHTSRISSVSSQFSDGPIPSPSARSSASSWSEEPVQSNMDISTGHMILSYMEDHLKNKNRLEKEWEALCAYQAEPNSSFVAQREENVPKNRSLAVLTYDHSRVLLKAENSHSHSDYINASPIMDHDPRNPAYIATQGPLPATVADFWQMVWESGCVVIVMLTPLAENGVRQCYHYWPDEGSNLYHIYEVNLVSEHIWCEDFLVRSFYLKNLQTNETRTVTQFHFLSWYDRGVPSSSRSLLDFRRKVNKCYRGRSCPIIVHCSDGAGRSGTYVLIDMVLNKMAKGAKEIDIAATLEHLRDQRPGMVQTKEQFEFALTAVAEEVNAILKALPQ

SEQ ID NO: 325 - protein, 1015 aa, Homo sapiens
MGPPLPLLLLLLLLLPPRVLPAAPSSVPRGRQLPGRLGCLLEEGLCGASEACVNDGVFGRCQKVPAMDFYRYEVSPVALQRLRVALQKLSGTGFTWQDDYTQYVMDQELADLPKTYLRRPEASSPARPSKHSVGSERRYSREGGAALANALRRHLPFLEALSQAPASDVLARTHTAQDRPPAEGDDRFSESILTYVAHTSALTYPPGSRTQLREDLLPRTLGQLQPDELSPKVDSGVDRHHLMAALSAYAAQRPPAPPGEGSLEPQYLLRAPSRMPRPLLAPAAPQKWPSPLGDSEDPSSTGDGARIHTLLKDLQRQPAEVRGLSGLELDGMAELMAGLMQGVDHGVARGSPGRAALGESGEQADGPKATLRGDSFPDDGVQDDDDRLYQEVHRLSATLGGLLQDHGSRLLPGALPFARPLDMERKKSEHPESSLSSEEETAGVENVKSQTYSKDLLGQQPHSEPGAAAFGELQNQMPGPSKEEQSLPAGAQEALSDGLQLEVQPSEEEARGYIVTDRDPLRPEEGRRLVEDVARLLQVPSSAFADVEVLGPAVTFKVSANVQNVTTEDVEKATVDNKDKLEETSGLKILQTGVGSKSKLKFLPPQAEQEDSTKFIALTLVSLACILGVLLASGLIYCLRHSSQHRLKEKLSGLGGDPGADATAAYQELCRQRMATRPPDRPEGPHTSRISSVSSQFSDGPIPSPSARSSASSWSEEPVQSNMDISTGHMILSYMEDHLKNKNRLEKEWEALCAYQAEPNSSFVAQREENVPKNRSLAVLTYDHSRVLLKAENSHSHSDYINASPIMDHDPRNPAYIATQGPLPATVADFWQMVWESGCVVIVMLTPLAENGVRQCYHYWPDEGSNLYHIYEVNLVSEHIWCEDFLVRSFYLKNLQTNETRTVTQFHFLSWYDRGVPSSSRSLLDFRRKVNKCYRGRSCPIIVHCSDGAGRSGTYVLIDMVLNKMAKGAKEIDIAATLEHLRDQRPGMVQTKEQFEFALTAVAEEVNAILKALPQ

SEQ ID NO: 326 - protein, 121 aa, Homo sapiens
MVLQTQVFISLLLWISGAYGDIVMTQSPDSLAVSLGERATINCKSSQSVLYSSNNKNYLAWYQQKPGQPPKLLIYWASTRESGVPDRFSGSGSGTDFTLTISSLQAEDVAVYYCQQYYSTP

SEQ ID NO: 327 - protein, 115 aa, Homo sapiens
MGSQVHLLSFLLLWISDTRAETTLTQSPAFMSATPGDKVNISCKASQDIDDDMNWYQQKPGEAAIFIIQEATTLVPGIPPRFSGSGYGTDFTLTINNIESEDAAYYFCLQHDNFP

SEQ ID NO: 328 - protein, 115 aa, Homo sapiens
MEAPAQLLFLLLLWLPDTTGEIVMTQSPATLSVSPGERATLSCRASQSVSSNLAWYQQKPGQAPRLLIYGASTRATGIPARFSGSGSGTEFTLTISSLQSEDFAVYYCQQYNNWP

SEQ ID NO: 329 - protein, 119 aa, Homo sapiens
MAWTPLLFLTLLLHCTGSLSQLVLTQSPSASASLGASVKLTCTLSSGHSSYAIAWHQQQPEKGPRYLMKLNSDGSHSKGDGIPDRFSGSSSGAERYLTISSLQSEDEADYYCQTWGTGI

SEQ ID NO: 330 - protein, 122 aa, Homo sapiens
MSVPTMAWMMLLLGLLAYGSGVDSQTVVTQEPSFSVSPGGTVTLTCGLSSGSVSTSYYPSWYQQTPGQAPRTLIYSTNTRSSGVPDRFSGSILGNKAALTITGAQADDESDYYCVLYMGSGI

SEQ ID NO: 331 - protein, 117 aa, Homo sapiens
MAWAPLLLTLLAHCTGSWANFMLTQPHSVSESPGKTVTISCTGSSGSIASNYVQWYQQRPGSAPTTVIYEDNQRPSGVPDRFSGSIDSSSNSASLTISGLKTEDEADYYCQSYDSSN

SEQ ID NO: 332 - protein, 117 aa, Homo sapiens
MPWALLLLTLLTHSAVSVVQAGLTQPPSVSKGLRQTATLTCTGNSNIVGNQGAAWLQQHQGHPPKLLSYRNNNRPSGISERFSASRSGNTASLTITGLQPEDEADYYCSALDSSLSA

SEQ ID NO: 333 - protein, 117 aa, Homo sapiens
MTCSPLLLTLLIHCTGSWAQSVLTQPPSVSAAPGQKVTISCSGSSSNIGNNYVSWYQQLPGTAPKLLIYDNNKRPSGIPDRFSGSKSGTSATLGITGLQTGDEADYYCGTWDSSLSA

SEQ ID NO: 334 - protein, 117 aa, Homo sapiens
MAGFPLLLTLLTHCAGSWAQSVLTQPPSASGTPGQRVTISCSGSSSNIGSNYVYWYQQLPGTAPKLLIYSNNQRPSGVPDRFSGSKSGTSASLAISGLRSEDEADYYCAAWDDSLSG

SEQ ID NO: 335 - protein, 123 aa, Homo sapiens
MAWTPLLLLFLSHCTGSLSQAVLTQPSSLSASPGASASLTCTLCSGINVGTYRIYWYQQKPGSPPQYLLRYKSDSDKQQGSGVPSRFSGSKDASANAGILLISGLQSEDEADYYCMIWHSSAS

SEQ ID NO: 336 - protein, 117 aa, Homo sapiens
MASFPLLLTLLTHCAGSWAQSVLTQPPSASGTPGQRVTISCSGSSSNIGSNTVNWYQQLPGTAPKLLIYSNNQRPSGVPDRFSGSKSGTSASLAISGLQSEDEADYYCAAWDDSLNG

SEQ ID NO: 337 - protein, 117 aa, Homo sapiens
MAWTPLFLFLLTCCPGSNSQTVVTQEPSLTVSPGGTVTLTCASSTGAVTSGYYPNWFQQKPGQAPRALIYSTSNKHSWTPARFSGSLLGGKAALTLSGVQPEDEAEYYCLLYYGGAQ

SEQ ID NO: 338 - protein, 118 aa, Homo sapiens
MAWSPLLLTLLAHCTGSWAQSVLTQPPSVSGAPGQRVTISCTGSSSNIGAGYDVHWYQQLPGTAPKLLIYGNSNRPSGVPDRFSGSKSGTSASLAITGLQAEDEADYYCQSYDSSLSG

SEQ ID NO: 339 - protein, 117 aa, Homo sapiens
MAWSPLFLTLITHCAGSWAQSVLTQPPSVSEAPRQRVTISCSGSSSNIGNNAVNWYQQLPGKAPKLLIYYDDLLPSGVSDRFSGSKSGTSASLAISGLQSEDEADYYCAAWDDSLNG

SEQ ID NO: 340 - protein, 112 aa, Homo sapiens
MAWIPLLLPLLTLCTGSEASYELTQPPSVSVSPGQTARITCSGDALPKQYAYWYQQKPGQAPVLVIYKDSERPSGIPERFSGSSSGTTVTLTISGVQAEDEADYYCQSADSS

SEQ ID NO: 341 - protein, 113 aa, Homo sapiens
MAWALLLLTLLTQDTGSWAQSALTQPASVSGSPGQSITISCTGTSSDVGSYNLVSWYQQHPGKAPKLMIYEGSKRPSGVSNRFSGSKSGNTASLTISGLQAEDEADYYCCSYA

SEQ ID NO: 342 - protein, 117 aa, Homo sapiens
MAWTVLLLGLLSHCTGSVTSYVLTQPPSVSVAPGQTARITCGGNNIGSKSVHWYQQKPGQAPVLVVYDDSDRPSGIPERFSGSNSGNTATLTISRVEAGDEADYYCQVWDSSSDHPT

SEQ ID NO: 343 - protein, 112 aa, Homo sapiens
MAWTPLWLTLLTLCIGSVVSSELTQDPAVSVALGQTVRITCQGDSLRSYYASWYQQKPGQAPVLVIYGKNNRPSGIPDRFSGSSSGNTASLTITGAQAEDEADYYCNSRDSS

SEQ ID NO: 344 - protein, 118 aa, Homo sapiens
MAWALLLLTLLTQGTGSWAQSALTQPPSVSGSPGQSVTISCTGTSSDVGSYNRVSWYQQPPGTAPKLMIYEVSNRPSGVPDRFSGSKSGNTASLTISGLQAEDEADYYCSLYTSSSTF

SEQ ID NO: 345 - protein, 120 aa, Homo sapiens
MAWALLLLTLLTQGTGSWAQSALTQPASVSGSPGQSITISCTGTSSDVGGYNYVSWYQQHPGKAPKLMIYEVSNRPSGVSNRFSGSKSGNTASLTISGLQAEDEADYYCSSYTSSSTLHS

SEQ ID NO: 346 - protein, 119 aa, Homo sapiens
MAWALLLLSLLTQGTGSWAQSALTQPRSVSGSPGQSVTISCTGTSSDVGGYNYVSWYQQHPGKAPKLMIYDVSKRPSGVPDRFSGSKSGNTASLTISGLQAEDEADYYCCSYAGSYTFH

SEQ ID NO: 347 - protein, 115 aa, Homo sapiens
MAWTPLLLPLLTFCTVSEASYELTQPPSVSVSPGQTARITCSGDALPKKYAYWYQQKSGQAPVLVIYEDSKRPSGIPERFSGSSSGTMATLTISGAQVEDEADYYCYSTDSSGNH

SEQ ID NO: 348 - protein, 115 aa, Homo sapiens
MAWTALLLSLLAHFTGSVASYELTQPLSVSVALGQTARITCGGNNIGSKNVHWYQQKPGQAPVLVIYRDSNRPSGIPERFSGSNSGNTATLTISRAQAGDEADYYCQVWDSSTAH

SEQ ID NO: 349 - protein, 115 aa, Homo sapiens
MAWIPLFLGVLAYCTGSVASYELTQPPSVSVSPGQTASITCSGDKLGDKYACWYQQKPGQSPVLVIYQDSKRPSGIPERFSGSNSGNTATLTISGTQAMDEADYYCQAWDSSTAH

SEQ ID NO: 350 - protein, 118 aa, Homo sapiens
MLLALALLLAFLPPASQKSSNLEGRTKSVTRPTGSSAVITCDLPVENAVYTHWYLHQEGKAPQRLLYYDSYNSRVVLESGISREKYHTYASTGKSLKFILENLIERDSGVYYCATWDR

SEQ ID NO: 351 - protein, 118 aa, Homo sapiens
MQWALAVLLAFLSPASQKSSNLEGRTKSVIRQTGSSAEITCDLAEGSTGYIHWYLHQEGKAPQRLLYYDSYTSSVVLESGISPGKYDTYGSTRKNLRMILRNLIENDSGVYYCATWDG

SEQ ID NO: 352 - protein, 118 aa, Homo sapiens
MRWALLVLLAFLSPASQKSSNLEGRTKSVTRQTGSSAEITCDLTVTNTFYIHWYLHQEGKAPQRLLYYDVSTARDVLESGLSPGKYYTHTPRRWSWILRLQNLIENDSGVYYCATWDR

SEQ ID NO: 353 - protein, 114 aa, Homo sapiens
MSIRLLCCVAFSLLWAGPVTAGITQAPTSQILAAGRSMTLRCTQDMRHNAMYWYRQDLGLGLRLIHYSNTAGTTGKGEVPDGYSVSRANTDDFPLTLASAVPSQTSVYFCASSD

SEQ ID NO: 354 - protein, 114 aa, Homo sapiens
MGCRLLCCVVFCLLQAGPLDTAVSQTPKYLVTQMGNDKSIKCEQNLGHDTMYWYKQDSKKFLKIMFSYNNKELIINETVPNRFSPKSPDKAHLNLHINSLELGDSAVYFCASSQ

SEQ ID NO: 355 - protein, 114 aa, Homo sapiens
MGPQLLGYVVLCLLGAGPLEAQVTQNPRYLITVTGKKLTVTCSQNMNHEYMSWYRQDPGLGLRQIYYSMNVEVTDKGDVPEGYKVSRKEKRNFPLILESPSPNQTSLYFCASSL

SEQ ID NO: 356 - protein, 121 aa, Homo sapiens
MSVSFLIFLPVLGLPWGVLSQVQLQQSGPGLVKPSQTLSLTCAISGDSVSSNSAAWNWIRQSPSRGLEWLGRTYYRSKWYNDYAVSVKSRITINPDTSKNQFSLQLNSVTPEDTAVYYCAR

SEQ ID NO: 357 - protein, 119 aa, Homo sapiens
MDTLCSTLLLLTIPSWVLSQITLKESGPTLVKPTQTLTLTCTFSGFSLSTSGVGVGWIRQPPGKALEWLALIYWDDDKRYSPSLKSRLTITKDTSKNQVVLTMTNMDPVDTATYYCAHR

SEQ ID NO: 358 - protein, 117 aa, Homo sapiens
MELGLSWVFLVAILEGVQCEVQLVESGGGLVQPGGSLRLSCAASGFTFSSYWMSWVRQAPGKGLEWVANIKQDGSEKYYVDSVKGRFTISRDNAKNSLYLQMNSLRAEDTAVYYCAR

SEQ ID NO: 359 - protein, 117 aa, Homo sapiens
MEFGLSWVFLVAIIKGVQCQVQLVESGGGLVKPGGSLRLSCAASGFTFSDYYMSWIRQAPGKGLEWVSYISSSSSYTNYADSVKGRFTISRDNAKNSLYLQMNSLRAEDTAVYYCAR

SEQ ID NO: 360 - protein, 119 aa, Homo sapiens
MEFGLSWIFLAAILKGVQCEVQLVESGGGLVKPGGSLRLSCAASGFTFSNAWMSWVRQAPGKGLEWVGRIKSKTDGGTTDYAAPVKGRFTISRDDSKNTLYLQMNSLKTEDTAVYYCTT

SEQ ID NO: 361 - protein, 117 aa, Homo sapiens
MDWTWSILFLVAAATGAHSQVQLVQSGAEVKKPGASVKVSCKASGYTFTSYGISWVRQAPGQGLEWMGWISAYNGNTNYAQKLQGRVTMTTDTSTSTAYMELRSLRSDDTAVYYCAR

SEQ ID NO: 362 - protein, 117 aa, Homo sapiens
MELGLRWVFLVAILEGVQCEVQLVESGGGLVKPGGSLRLSCAASGFTFSSYSMNWVRQAPGKGLEWVSSISSSSSYIYYADSVKGRFTISRDNAKNSLYLQMNSLRAEDTAVYYCAR

SEQ ID NO: 363 - protein, 117 aa, Homo sapiens
MEFGLSWLFLVAILKGVQCEVQLVESGGGLVQPGGSLRLSCAASGFTFSSYAMSWVRQAPGKGLEWVSAISGSGGSTYYADSVKGRFTISRDNSKNTLYLQMNSLRAEDTAVYYCAK

SEQ ID NO: 364 - protein, 119 aa, Homo sapiens
MDTLCYTLLLLTTPSWVLSQVTLKESGPVLVKPTETLTLTCTVSGFSLSNARMGVSWIRQPPGKALEWLAHIFSNDEKSYSTSLKSRLTISKDTSKSQVVLTMTNMDPVDTATYYCARI

SEQ ID NO: 365 - protein, 123 aa, Homo sapiens
MDLLHKNMKHLWFFLLLVAAPRWVLSQVQLQQWGAGLLKPSETLSLTCAVYGGSFSGYYWSWIRQPPGKGLEWIGEINHSGSTNYNPSLKSRVTISVDTSKNQFSLKLSSVTAADTAVYYCAR

SEQ ID NO: 366 - protein, 125 aa, Homo sapiens
MDLMCKKMKHLWFFLLLVAAPRWVLSQLQLQESGPGLVKPSETLSLTCTVSGGSISSSSYYWGWIRQPPGKGLEWIGSIYYSGSTYYNPSLKSRVTISVDTSKNQFSLKLSSVTAADTAVYYCAR

SEQ ID NO: 367 - protein, 117 aa, Homo sapiens
MDWTWRVFCLLAVAPGAHSQVQLVQSGAEVKKPGASVKVSCKASGYTFTSYYMHWVRQAPGQGLEWMGIINPSGGSTSYAQKFQGRVTMTRDTSTSTVYMELSSLRSEDTAVYYCAR

SEQ ID NO: 368 - protein, 117 aa, Homo sapiens
MELGLCWVFLVAILEGVQCEVQLVESGGGLVQPGGSLRLSCAASGFTFSSYEMNWVRQAPGKGLEWVSYISSSGSTIYYADSVKGRFTISRDNAKNSLYLQMNSLRAEDTAVYYCAR

SEQ ID NO: 369 - protein, 119 aa, Homo sapiens
MEFGLSWVFLVAILKGVQCEVQLVESGGGLVQPGRSLRLSCTASGFTFGDYAMSWVRQAPGKGLEWVGFIRSKAYGGTTEYAASVKGRFTISRDDSKSIAYLQMNSLKTEDTAVYYCTR

SEQ ID NO: 370 - protein, 117 aa, Homo sapiens
MGSTAILALLLAVLQGVCAEVQLVQSGAEVKKPGESLKISCKGSGYSFTSYWIGWVRQMPGKGLEWMGIIYPGDSDTRYSPSFQGQVTISADKSISTAYLQWSSLKASDTAMYYCAR

SEQ ID NO: 371 - protein, 116 aa, Homo sapiens
MKHLWFFLLLVAAPRWVLSQVQLQESGPGLVKPSETLSLTCTVSGGSISSYYWSWIRQPPGKGLEWIGYIYYSGSTNYNPSLKSRVTISVDTSKNQFSLKLSSVTAADTAVYYCAR

SEQ ID NO: 372 - protein, 127 aa, Homo sapiens
MSPHPTALLGLVLCLAQTIHTQEEDLPRPSISAEPGTVIPLGSHVTFVCRGPVGVQTFRLERDSRSTYNDTEDVSQASPSESEARFRIDSKALEARTPRTQSPAPQLDPRRGRRTTVTMSMHLLPKA

SEQ ID NO: 373 - protein, 287 aa, Homo sapiens
MSPHPTALLGLVLCLAQTIHTQEEDLPRPSISAEPGTVIPLGSHVTFVCRGPVGVQTFRLERDSRSTYNDTEDVSQASPSESEARFRIDSVREGNAGLYRCIYYKPPKWSEQSDYLELLVKESSGGPDSPDTEPGSSAGPTQRPSDNSHNEHAPASQGLKAEHLYILIGVSVVFLFCLLLLVLFCLHRQNQIKQGPPRSKDEEQKPQQRPDLAVDVLERTADKATVNGLPEKDRETDTSALAAGSSQEVTYAQLDHWALTQRTARAVSPQSTKPMAESITYAAVARH

SEQ ID NO: 374 - protein, 567 aa, Homo sapiens
MAPLALHLLVLVPILLSLVASQDWKAERSQDPFEKCMQDPDYEQLLKVVTWGLNRTLKPQRVIVVGAGVAGLVAAKVLSDAGHKVTILEADNRIGGRIFTYRDQNTGWIGELGAMRMPSSHRILHKLCQGLGLNLTKFTQYDKNTWTEVHEVKLRNYVVEKVPEKLGYALRPQEKGHSPEDIYQMALNQALKDLKALGCRKAMKKFERHTLLEYLLGEGNLSRPAVQLLGDVMSEDGFFYLSFAEALRAHSCLSDRLQYSRIVGGWDLLPRALLSSLSGLVLLNAPVVAMTQGPHDVHVQIETSPPARNLKVLKADVVLLTASGPAVKRITFSPPLPRHMQEALRRLHYVPATKVFLSFRRPFWREEHIEGGHSNTDRPSRMIFYPPPREGALLLASYTWSDAAAAFAGLSREEALRLALDDVAALHGPVVRQLWDGTGVVKRWAEDQHSQGGFVVQPPALWQTEKDDWTVPYGRIYFAGEHTAYPHGWVETAVKSALRAAIKINSRKGPASDTASPEGHASDMEGQGHVHGVASSPSHDLAKEEGSHPPVQGQLSLQNTTHTRTSH

SEQ ID NO: 375 - protein, 311 aa, Homo sapiens
MLLWTAVLLFVPCVGKTVWLYLQAWPNPVFEGDALTLRCQGWKNTPLSQVKFYRDGKFLHFSKENQTLSMGAATVQSRGQYSCSGQVMYIPQTFTQTSETAMVQVQAPVSRPVLTLHHGPADPAVGDMVQLLCEAQRGSPPILYSFYLDEKIVGNHSAPCGGTTSLLFPVKSEQDAGNYSCEAENSVSRERSEPKKLSLKGSQVLFTPASNWLVPWLPASLLGLMVIAAALLVYVRSWRKAGPLPSQIPPTAPGGEQCPLYANVHHQKGKDEGVVYSVVHRTSKRSEARSAEFTVGRKFYHLCGGEMPAAQ

SEQ ID NO: 376 - protein, 290 aa, Homo sapiens
MVTSSFPISVAVFALITLQVGTQDSFIAAVYEHAVILPNKTETPVSQEDALNLMNENIDILETAIKQAAEQGARIIVTPEDALYGWKFTRETVFPYLEDIPDPQVNWIPCQDPHRFGHTPVQARLSCLAKDNSIYVLANLGDKKPCNSRDSTCPPNGYFQYNTNVVYNTEGKLVARYHKYHLYSEPQFNVPEKPELVTFNTAFGRFGIFTCFDIFFYDPGVTLVKDFHVDTILFPTAWMNVLPLLTAIEFHSAWAMGMGVNLLVANTHHVSLNMTVVFMHQMVPKCIIMT

SEQ ID NO: 377 - protein, 370 aa, Homo sapiens
MHRLIFVYTLICANFCSCRDTSATPQSASIKALRNANLRRDESNHLTDLYRRDETIQVKGNGYVQSPRFPNSYPRNLLLTWRLHSQENTRIQLVFDNQFGLEEAENDICRYDFVEVEDISETSTIIRGRWCGHKEVPPRIKSRTNQIKITFKSDDYFVAKPGFKIYYSLLEDFQPAAASETNWESVTSSISGVSYNSPSVTDPTLIADALDKKIAEFDTVEDLLKYFNPESWQEDLENMYLDTPRYRGRSYHDRKSKVDLDRLNDDAKRYSCTPRNYSVNIREELKLANVVFFPRCLLVQRCGGNCGCGTVNWRSCTCNSGKTVKKYHEVLQFEPGHIKRRGRAKTMALVDIQLDHHERCDCICSSRPPR

SEQ ID NO: 378 - protein, 879 aa, Homo sapiens
MGRLASRPLLLALLSLALCRGRVVRVPTATLVRVVGTELVIPCNVSDYDGPSEQNFDWSFSSLGSSFVELASTWEVGFPAQLYQERLQRGEILLRRTANDAVELHIKNVQPSDQGHYKCSTPSTDATVQGNYEDTVQVKVLADSLHVGPSARPPPSLSLREGEPFELRCTAASASPLHTHLALLWEVHRGPARRSVLALTHEGRFHPGLGYEQRYHSGDVRLDTVGSDAYRLSVSRALSADQGSYRCIVSEWIAEQGNWQEIQEKAVEVATVVIQPSVLRAAVPKNVSVAEGKELDLTCNITTDRADDVRPEVTWSFSRMPDSTLPGSRVLARLDRDSLVHSSPHVALSHVDARSYHLLVRDVSKENSGYYYCHVSLWAPGHNRSWHKVAEAVSSPAGVGVTWLEPDYQVYLNASKVPGFADDPTELACRVVDTKSGEANVRFTVSWYYRMNRRSDNVVTSELLAVMDGDWTLKYGERSKQRAQDGDFIFSKEHTDTFNFRIQRTTEEDRGNYYCVVSAWTKQRNNSWVKSKDVFSKPVNIFWALEDSVLVVKARQPKPFFAAGNTFEMTCKVSSKNIKSPRYSVLIMAEKPVGDLSSPNETKYIISLDQDSVVKLENWTDASRVDGVVLEKVQEDEFRYRMYQTQVSDAGLYRCMVTAWSPVRGSLWREAATSLSNPIEIDFQTSGPIFNASVHSDTPSVIRGDLIKLFCIITVEGAALDPDDMAFDVSWFAVHSFGLDKAPVLLSSLDRKGIVTTSRRDWKSDLSLERVSVLEFLLQVHGSEDQDFGNYYCSVTPWVKSPTGSWQKEAEIHSKPVFITVKMDVLNAFKYPLLIGVGLSTVIGLLSCLIGYCSSHWCCKKEVQETRRERRRLMSMEMD

SEQ ID NO: 379 - protein, 1298 aa, Homo sapiens
MQRGAALCLRLWLCLGLLDGLVSGYSMTPPTLNITEESHVIDTGDSLSISCRGQHPLEWAWPGAQEAPATGDKDSEDTGVVRDCEGTDARPYCKVLLLHEVHANDTGSYVCYYKYIKARIEGTTAASSYVFVRDFEQPFINKPDTLLVNRKDAMWVPCLVSIPGLNVTLRSQSSVLWPDGQEVVWDDRRGMLVSTPLLHDALYLQCETTWGDQDFLSNPFLVHITGNELYDIQLLPRKSLELLVGEKLVLNCTVWAEFNSGVTFDWDYPGKQAERGKWVPERRSQQTHTELSSILTIHNVSQHDLGSYVCKANNGIQRFRESTEVIVHENPFISVEWLKGPILEATAGDELVKLPVKLAAYPPPEFQWYKDGKALSGRHSPHALVLKEVTEASTGTYTLALWNSAAGLRRNISLELVVNVPPQIHEKEASSPSIYSRHSRQALTCTAYGVPLPLSIQWHWRPWTPCKMFAQRSLRRRQQQDLMPQCRDWRAVTTQDAVNPIESLDTWTEFVEGKNKTVSKLVIQNANVSAMYKCVVSNKVGQDERLIYFYVTTIPDGFTIESKPSEELLEGQPVLLSCQADSYKYEHLRWYRLNLSTLHDAHGNPLLLDCKNVHLFATPLAASLEEVAPGARHATLSLSIPRVAPEHEGHYVCEVQDRRSHDKHCHKKYLSVQALEAPRLTQNLTDLLVNVSDSLEMQCLVAGAHAPSIVWYKDERLLEEKSGVDLADSNQKLSIQRVREEDAGRYLCSVCNAKGCVNSSASVAVEGSEDKGSMEIVILVGTGVIAVFFWVLLLLIFCNMRRPAHADIKTGYLSIIMDPGEVPLEEQCEYLSYDASQWEFPRERLHLGRVLGYGAFGKVVEASAFGIHKGSSCDTVAVKMLKEGATASEHRALMSELKILIHIGNHLNVVNLLGACTKPQGPLMVIVEFCKYGNLSNFLRAKRDAFSPCAEKSPEQRGRFRAMVELARLDRRRPGSSDRVLFARFSKTEGGARRASPDQEAEDLWLSPLTMEDLVCYSFQVARGMEFLASRKCIHRDLAARNILLSESDVVKICDFGLARDIYKDPDYVRKGSARLPLKWMAPESIFDKVYTTQSDVWSFGVLLWEIFSLGASPYPGVQINEEFCQRLRDGTRMRAPELATPAIRRIMLNCWSGDPKARPAFSELVEILGDLLQGRGLQEEEEVCMAPRSSQSSEEGSFSQVSTMALHIAQADAEDSPPSLQRHSLAARYYNWVSFPGCLARGAETRGSSRMKTFEEFPMTPTTYKGSVDNQTDSGMVLASEEFEQIESRHRQESGFR

SEQ ID NO: 380 - protein, 1896 aa, Homo sapiens
MPLPPRSLQVLLLLLLLLLLLPGMWAEAGLPRAGGGSQPPFRTFSASDWGLTHLVVHEQTGEVYVGAVNRIYKLSGNLTLLRAHVTGPVEDNEKCYPPPSVQSCPHGLGSTDNVNKLLLLDYAANRLLACGSASQGICQFLRLDDLFKLGEPHHRKEHYLSSVQEAGSMAGVLIAGPPGQGQAKLFVGTPIDGKSEYFPTLSSRRLMANEEDADMFGFVYQDEFVSSQLKIPSDTLSKFPAFDIYYVYSFRSEQFVYYLTLQLDTQLTSPDAAGEHFFTSKIVRLCVDDPKFYSYVEFPIGCEQAGVEYRLVQDAYLSRPGRALAHQLGLAEDEDVLFTVFAQGQKNRVKPPKESALCLFTLRAIKEKIKERIQSCYRGEGKLSLPWLLNKELGCINSPLQIDDDFCGQDFNQPLGGTVTIEGTPLFVDKDDGLTAVAAYDYRGRTVVFAGTRSGRIRKILVDLSNPGGRPALAYESVVAQEGSPILRDLVLSPNHQYLYAMTEKQVTRVPVESCVQYTSCELCLGSRDPHCGWCVLHSICSRRDACERADEPQRFAADLLQCVQLTVQPRNVSVTMSQVPLVLQAWNVPDLSAGVNCSFEDFTESESVLEDGRIHCRSPSAREVAPITRGQGDQRVVKLYLKSKETGKKFASVDFVFYNCSVHQSCLSCVNGSFPCHWCKYRHVCTHNVADCAFLEGRVNVSEDCPQILPSTQIYVPVGVVKPITLAARNLPQPQSGQRGYECLFHIPGSPARVTALRFNSSSLQCQNSSYSYEGNDVSDLPVNLSVVWNGNFVIDNPQNIQAHLYKCPALRESCGLCLKADPRFECGWCVAERRCSLRHHCAADTPASWMHARHGSSRCTDPKILKLSPETGPRQGGTRLTITGENLGLRFEDVRLGVRVGKVLCSPVESEYISAEQIVCEIGDASSVRAHDALVEVCVRDCSPHYRALSPKRFTFVTPTFYRVSPSRGPLSGGTWIGIEGSHLNAGSDVAVSVGGRPCSFSWRNSREIRCLTPPGQSPGSAPIIININRAQLTNPEVKYNYTEDPTILRIDPEWSINSGGTLLTVTGTNLATVREPRIRAKYGGIERENGCLVYNDTTMVCRAPSVANPVRSPPELGERPDELGFVMDNVRSLLVLNSTSFLYYPDPVLEPLSPTGLLELKPSSPLILKGRNLLPPAPGNSRLNYTVLIGSTPCTLTVSETQLLCEAPNLTGQHKVTVRAGGFEFSPGTLQVYSDSLLTLPAIVGIGGGGGLLLLVIVAVLIAYKRKSRDADRTLKRLQLQMDNLESRVALECKEAFAELQTDIHELTNDLDGAGIPFLDYRTYAMRVLFPGIEDHPVLKEMEVQANVEKSLTLFGQLLTKKHFLLTFIRTLEAQRSFSMRDRGNVASLIMTALQGEMEYATGVLKQLLSDLIEKNLESKNHPKLLLRRTESVAEKMLTNWFTFLLYKFLKECAGEPLFMLYCAIKQQMEKGPIDAITGEARYSLSEDKLIRQQIDYKTLTLNCVNPENENAPEVPVKGLDCDTVTQAKEKLLDAAYKGVPYSQRPKAADMDLEWRQGRMARIILQDEDVTTKIDNDWKRLNTLAHYQVTDGSSVALVPKQTSAYNISNSSTFTKSLSRYESMLRTASSPDSLRSRTPMITPDLESGTKLWHLVKNHDHLDQREGDRGSKMVSEIYLTRLLATKGTLQKFVDDLFETIFSTAHRGSALPLAIKYMFDFLDEQADKHQIHDADVRHTWKSNCLPLRFWVNVIKNPQFVFDIHKNSITDACLSVVAQTFMDSCSTSEHKLGKDSPSNKLLYAKDIPNYKSWVERYYADIAKMPAISDQDMSAYLAEQSRLHLSQFNSMSALHEIYSYITKYKDEILAALEKDEQARRQRLRSKLEQVVDTMALSS

SEQ ID NO: 381 - protein, 323 aa, Homo sapiens
MGLSNILFVMAFLLSGAAPLKIQAYFNETADLPCQFANSQNQSLSELVVFWQDQENLVLNEVYLGKEKFDSVHSKYMGRTSFDSDSWTLRLHNLQIKDKGLYQCIIHHKKPTGMIRIHQMNSELSVLANFSQPEIVPISNITENVYINLTCSSIHGYPEPKKMSVLLRTKNSTIEYDGVMQKSQDNVTELYDVSISLSVSFPDVTSNMTIFCILETDKTRLLSSPFSIELEDPQPPPDHIPWITAVLPTVIICVMVFCLILWKWKKKKRPRNSYKCGTNTMEREESEQTKKREKIHIPERSDEAQRVFKSSKTSSCDKSDTCF

SEQ ID NO: 382 - protein, 237 aa, Homo sapiens
MGSLFPLSLLFFLAAAYPGVGSALGRRTKRAQSPKGSPLAPSGTSVPFWVRMSPEFVAVQPGKSVQLNCSNSCPQPQNSSLRTPLRQGKTLRGPGWVSYQLLDVRAWSSLAHCLVTCAGKTRWATSRITAYKPPHSVILEPPVLKGRKYTLRCHVTQVFPVGYLVVTLRHGSRVIYSESLERFTGLDLANVTLTYEFAAGPRDFWQPVICHARLNLDGLVVRNSSAPITLMLGEAPL

SEQ ID NO: 383 - protein, 568 aa, Homo sapiens
MERAVRVESGVLVGVVCLLLACPATATGPEVAQPEVDTTLGRVRGRQVGVKGTDRLVNVFLGIPFAQPPLGPDRFSAPHPAQPWEGVRDASTAPPMCLQDVESMNSSRFVLNGKQQIFSVSEDCLVLNVYSPAEVPAGSGRPVMVWVHGGALITGAATSYDGSALAAYGDVVVVTVQYRLGVLGFFSTGDEHAPGNQGFLDVVAALRWVQENIAPFGGDLNCVTVFGGSAGGSIISGLVLSPVAAGLFHRAITQSGVITTPGIIDSHPWPLAQKIANTLACSSSSPAEMVQCLQQKEGEELVLSKKLKNTIYPLTVDGTVFPKSPKELLKEKPFHSVPFLMGVNNHEFSWLIPRGWGLLDTMEQMSREDMLAISTPVLTSLDVPPEMMPTVIDEYLGSNSDAQAKCQAFQEFMGDVFINVPTVSFSRYLRDSGSPVFFYEFQHRPSSFAKIKPAWVKADHGAEGAFVFGGPFLMDESSRLEATEEEKQLSLTMMAQWTHFARTGDPNSKALPPWPQFNQAEQYLEINPVPRAGQKFREAWMQFWSETLPSKIQQWHQKQKNRKAQEDL

SEQ ID NO: 384 - protein, 167 aa, Homo sapiens
MKLWVSALLMAWFGVLSCVQAEFFTSIGHMTDLIYAEKELVQSLKEYILVEEAKLSKIKSWANKMEALTSKSAADAEGYLAHPVNAYKLVKRLNTDWPALEDLVLQDSAAGFIANLSVQRQFFPTDEDEIGAAKALMRLQDTYRLDPGTISRGELPGTKYQAMLSVD

SEQ ID NO: 385 - protein, 227 aa, Homo sapiens
MGHEQNQGAALLQMLPLLWLLPHSWAVPEAPTPMWPDDLQNHTFLHTVYCQDGSPSVGLSEAYDEDQLFFFDFSQNTRVPRLPEFADWAQEQGDAPAILFDKEFCEWMIQQIGPKLDGKIPVSRVNWQHHSVPVEGFGPTFVSAVDGLSFQAFSYLNFTPEPSDIFSCIVTHEIDRYTAIAYWVPRNALPSDLLENVLCGVAFGLGVLGIIVGIVLIIYFRKPCSGD

SEQ ID NO: 386 - protein, 166 aa, Homo sapiens
MGHEQNQGAALLQMLPLLWLLPHSWAVPEGFPIAEVFTLKPLEFGKPNTLVCFVSNLFPPMLTVNWQHHSVPVEGFGPTFVSAVDGLSFQAFSYLNFTPEPSDIFSCIVTHEIDRYTAIAYWVPRNALPSDLLENVLCGVAFGLGVLGIIVGIVLIIYFRKPCSGD

SEQ ID NO: 387 - protein, 254 aa, Homo sapiens
MAISGVPVLGFFIIAVLMSAQESWAIKEEHVIIQAEFYLNPDQSGEFMFDFDGDEIFHVDMAKKETVWRLEEFGRFASFEAQGALANIAVDKANLEIMTKRSNYTPITNVPPEVTVLTNSPVELREPNVLICFIDKFTPPVVNVTWLRNGKPVTTGVSETVFLPREDHLFRKFHYLPFLPSTEDVYDCRVEHWGLDEPLLKHWEFDAPSPLPETTENVVCALGLTVGLVGIIIGTIFIIKGLRKSNAAERRGPL

SEQ ID NO: 388 - protein, 815 aa, Homo sapiens
METGLGAPLFKAWLLISVWGLGVDPSLQIDVLTELELGESTTGVRQVPGLHNGTKAFLFQDTPRSIKASTATAEQFFQKLRNKHEFTILVTLKQTHLNSGVILSIHHLDHRYLELESSGHRNEVRLHYRSGSHRPHTEVFPYILADDKWHKLSLAISASHLILHIDCNKIYERVVEKPSTDLPLGTTFWLGQRNNAHGYFKGIMQDVQLLVMPQGFIAQCPDLNRTCPTCNDFHGLVQKIMELQDILAKTSAKLSRAEQRMNRLDQCYCERTCTMKGTTYREFESWIDGCKNCTCLNGTIQCETLICPNPDCPLKSALAYVDGKCCKECKSICQFQGRTYFEGERNTVYSSSGVCVLYECKDQTMKLVESSGCPALDCPESHQITLSHSCCKVCKGYDFCSERHNCMENSICRNLNDRAVCSCRDGFRALREDNAYCEDIDECAEGRHYCRENTMCVNTPGSFMCICKTGYIRIDDYSCTEHDECITNQHNCDENALCFNTVGGHNCVCKPGYTGNGTTCKAFCKDGCRNGGACIAANVCACPQGFTGPSCETDIDECSDGFVQCDSRANCINLPGWYHCECRDGYHDNGMFSPSGESCEDIDECGTGRHSCANDTICFNLDGGYDCRCPHGKNCTGDCIHDGKVKHNGQIWVLENDRCSVCSCQNGFVMCRRMVCDCENPTVDLFCCPECDPRLSSQCLHQNGETLYNSGDTWVQNCQQCRCLQGEVDCWPLPCPDVECEFSILPENECCPRCVTDPCQADTIRNDITKTCLDEMNVVRFTGSSWIKHGTECTLCQCKNGHICCSVDPQCLQEL

SEQ ID NO: 389 - protein, 325 aa, Homo sapiens
MGPRARPALLLLMLLQTAVLQGRLLPLGYVDDQLFVFYDHESRRVEPRTPWVSSRISSQMWLQLSQSLKGWDHMFTVDFWTIMENHNHSKESHTLQVILGCEMQEDNSTEGYWKYGYDGQDHLEFCPDTLDWRAAEPRAWPTKLEWERHKIRARQNRAYLERDCPAQLQQLLELGRGVLDQQVPPLVKVTHHVTSSVTTLRCRALNYYPQNITMKWLKDKQPMDAKEFEPKDVLPNGDGTYQGWITLAVPPGEEQRYTCQVEHPGLDQPLIVIWEPSPSGTLVIGVISGIAVFVVILFIGILFIILRKRQGSRGAMGHYVLAERE

SEQ ID NO: 390 - protein, 820 aa, Homo sapiens
MWSWKCLLFWAVLVTATLCTARPSPTLPEQAQPWGAPVEVESFLVHPGDLLQLRCRLRDDVQSINWLRDGVQLAESNRTRITGEEVEVQDSVPADSGLYACVTSSPSGSDTTYFSVNVSDALPSSEDDDDDDDSSSEEKETDNTKPNPVAPYWTSPEKMEKKLHAVPAAKTVKFKCPSSGTPNPTLRWLKNGKEFKPDHRIGGYKVRYATWSIIMDSVVPSDKGNYTCIVENEYGSINHTYQLDVVERSPHRPILQAGLPANKTVALGSNVEFMCKVYSDPQPHIQWLKHIEVNGSKIGPDNLPYVQILKTAGVNTTDKEMEVLHLRNVSFEDAGEYTCLAGNSIGLSHHSAWLTVLEALEERPAVMTSPLYLEIIIYCTGAFLISCMVGSVIVYKMKSGTKKSDFHSQMAVHKLAKSIPLRRQVTVSADSSASMNSGVLLVRPSRLSSSGTPMLAGVSEYELPEDPRWELPRDRLVLGKPLGEGCFGQVVLAEAIGLDKDKPNRVTKVAVKMLKSDATEKDLSDLISEMEMMKMIGKHKNIINLLGACTQDGPLYVIVEYASKGNLREYLQARRPPGLEYCYNPSHNPEEQLSSKDLVSCAYQVARGMEYLASKKCIHRDLAARNVLVTEDNVMKIADFGLARDIHHIDYYKKTTNGRLPVKWMAPEALFDRIYTHQSDVWSFGVLLWEIFTLGGSPYPGVPVEELFKLLKEGHRMDKPSNCTNELYMMMRDCWHAVPSQRPTFKQLVEDLDRIVALTSNQEYLDLSMPLDQYSPSFPDTRSSTCSSGEDSVFSHEPLPEEPCLPRHPAQLANGGLKRR

SEQ ID NO: 391 - protein, 733 aa, Homo sapiens
MWSWKCLLFWAVLVTATLCTARPSPTLPEQDALPSSEDDDDDDDSSSEEKETDNTKPNPVAPYWTSPEKMEKKLHAVPAAKTVKFKCPSSGTPNPTLRWLKNGKEFKPDHRIGGYKVRYATWSIIMDSVVPSDKGNYTCIVENEYGSINHTYQLDVVERSPHRPILQAGLPANKTVALGSNVEFMCKVYSDPQPHIQWLKHIEVNGSKIGPDNLPYVQILKHSGINSSDAEVLTLFNVTEAQSGEYVCKVSNYIGEANQSAWLTVTRPVAKALEERPAVMTSPLYLEIIIYCTGAFLISCMVGSVIVYKMKSGTKKSDFHSQMAVHKLAKSIPLRRQVTVSADSSASMNSGVLLVRPSRLSSSGTPMLAGVSEYELPEDPRWELPRDRLVLGKPLGEGCFGQVVLAEAIGLDKDKPNRVTKVAVKMLKSDATEKDLSDLISEMEMMKMIGKHKNIINLLGACTQDGPLYVIVEYASKGNLREYLQARRPPGLEYCYNPSHNPEEQLSSKDLVSCAYQVARGMEYLASKKCIHRDLAARNVLVTEDNVMKIADFGLARDIHHIDYYKKTTNGRLPVKWMAPEALFDRIYTHQSDVWSFGVLLWEIFTLGGSPYPGVPVEELFKLLKEGHRMDKPSNCTNELYMMMRDCWHAVPSQRPTFKQLVEDLDRIVALTSNQEYLDLSMPLDQYSPSFPDTRSSTCSSGEDSVFSHEPLPEEPCLPRHPAQLANGGLKRR

SEQ ID NO: 392 - protein, 108 aa, Homo sapiens
MLGLRPPLLALVGLLSLGCVLSQECTKFKVSSCRECIESGPGCTWCQKLGAALGPPAHATAASSPRRRSRVAPVCPRTEQGGQAPGGNYLGQAGFFPSPFWRFSAPLK

SEQ ID NO: 393 - protein, 224 aa, Homo sapiens
MSWKKALRIPGDLRVATVTLMLAMLSSLLAEGRDSPEDFVFQFKGMCYFTNGTERVRLVTRYIYNREEYARFDSDVGVYRAVTPQGRPDAEYWNSQKEVLEGTRAELDTVCRHNYEVAFRGILQRRVEPTVTISPSRTEALNHHNLLVCSVTDFYPGQIKVRWFRNDQEETAGVVSTPLIRNGDWTFQILVMLEMTPQRGDVYTCHVEHPSLQSPITVEWRLLH

SEQ ID NO: 394 - protein, 134 aa, Homo sapiens
MSWKKALRIPGDLRVATVTLMLAMLSSLLAEGRDSPVEPTVTISPSRTEALNHHNLLVCSVTDFYPGQIKVRWFRNDQEETAGVVSTPLIRNGDWTFQILVMLEMTPQRGDVYTCHVEHPSLQSPITVEWRLLH

SEQ ID NO: 395 - protein, 261 aa, Homo sapiens
MSWKKALRIPGDLRVATVTLMLAMLSSLLAEGRDSPEDFVFQFKGMCYFTNGTERVRLVTRYIYNREEYARFDSDVGVYRAVTPQGRPDAEYWNSQKEVLEGTRAELDTVCRHNYEVAFRGILQRRVEPTVTISPSRTEALNHHNLLVCSVTDFYPGQIKVRWFRNDQEETAGVVSTPLIRNGDWTFQILVMLEMTPQRGDVYTCHVEHPSLQSPITVEWRAQSESAQSKMLSGVGGFVLGLIFLGLGLIIRQRSQKGLLH

SEQ ID NO: 396 - protein, 145 aa, Homo sapiens
MSLLLPPLALLLLLAALVAPATAATAYRPDWNRLSGLTRARVETCGGUQLNRLKEVKAFVTQDIPFYHNLVMKHLPGADPELVLLGRRYEELERIPLSEMTREEINALVQELGFYRKAAPDAQVPPEYVWAPAKPPEETSDHADL

SEQ ID NO: 397 - protein, 196 aa, Homo sapiens
MRTLACLLLLGCGYLAHVLAEEAEIPREVIERLARSQIHSIRDLQRLLEIDSVGSEDSLDTSLRAHGVHATKHVPEKRPLPIRRKRSIEEAVPAVCKTRTVIYEIPRSQVDPTSANFLIWPPCVEVKRCTGCCNTSSVKCQPSRVHHRSVKVAKVEYVRKKPKLKEVQVRLEEHLECACATTSLNPDYREEDTDVR

SEQ ID NO: 398 - protein, 560 aa, Homo sapiens
MLRGTLLCAVLGLLRAQPFPCPPACKCVFRDAAQCSGGDVARISALGLPTNLTHILLFGMGRGVLQSQSFSGMTVLQRLMISDSHISAVAPGTFSDLIKLKTLRLSRNKITHLPGALLDKMVLLEQLFLDHNALRGIDQNMFQKLVNLQELALNQNQLDFLPASLFTNLENLKLLDLSGNNLTHLPKGLLGAQAKLERLLLHSNRLVSLDSGLLNSLGALTELQFHRNHIRSIAPGAFDRLPNLSSLTLSRNHLAFLPSALFLHSHNLTLLTLFENPLAELPGVLFGEMGGLQELWLNRTQLRTLPAAAFRNLSRLRYLGVTLSPRLSALPQGAFQGLGELQVLALHSNGLTALPDGLLRGLGKLRQVSLRRNRLRALPRALFRNLSSLESVQLDHNQLETLPGDVFGALPRLTEVLLGHNSWRCDCGLGPFLGWLRQHLGLVGGEEPPRCAGPGAHAGLPLWALPGGDAECPGPRGPPPRPAADSSSEAPVHPALAPNSSEPWVWAQPVTTGKGQDHSPFWGFYFLLLAVQAMITVIIVFAMIKIGQLFRKLIRERALG

SEQ ID NO: 399 - protein, 897 aa, Homo sapiens
MVLAQGLLSMALLALCWERSLAGAEETIPLQTLRCYNDYTSHITCRWADTQDAQRLVNVTLIRRVNEDLLEPVSCDLSDDMPWSACPHPRCVPRRCVIPCQSFVVTDVDYFSFQPDRPLGTRLTVTLTQHVQPPEPRDLQISTDQDHFLLTWSVALGSPQSHWLSPGDLEFEVVYKRLQDSWEDAAILLSNTSQATLGPEHLMPSSTYVARVRTRLAPGSRLSGRPSKWSPEVCWDSQPGDEAQPQNLECFFDGAAVLSCSWEVRKEVASSVSFGLFYKPSPDAGEEECSPVLREGLGSLHTRHHCQIPVPDPATHGQYIVSVQPRRAEKHIKSSVNIQMAPPSLNVTKDGDSYSLRWETMKMRYEHIDHTFEIQYRKDTATWKDSKTETLQNAHSMALPALEPSTRYWARVRVRTSRTGYNGIWSEWSEARSWDTESVLPMWVLALIVIFLTIAVLLALRFCGIYGYRLRRKWEEKIPNPSKSHLFQNGSAELWPPGSMSAFTSGSPPHQGPWGSRFPELEGVFPVGFGDSEVSPLTIEDPKHVCDPPSGPDTTPAASDLPTEQPPSPQPGPPAASHTPEKQASSFDFNGPYLGPPHSRSLPDILGQPEPPQEGGSQKSPPPGSLEYLCLPAGGQVQLVPLAQAMGPGQAVEVERRPSQGAAGSPSLESGGGPAPPALGPRVGGQDQKDSPVAIPMSSGDTEDPGVASGYVSSADLVFTPNSGASSVSLVPSLGLPSDQTPSLCPGLASGPPGAPGPVKSGFEGYVELPPIEGRSPRSPRNNPVPPEAKSPVLNPGERPADVSPTSPQPEGLLVLQQVGDYCFLPGLGPGPLSLRSKPSSPGPGPEIKNLDQAFQVKKPPGQAVPQVPVIQLFKALKQQDYLSLPPWEVNKPGEVC

SEQ ID NO: 400 - protein, 725 aa, Homo sapiens
MLQTKDLIWTLFFLGTAVSLQVDIVPSQGEISVGESKFFLCQVAGDAKDKDISWFSPNGEKLTPNQQRISVVWNDDSSSTLTIYNANIDDAGIYKCVVTGEDGSESEATVNVKIFQKLMFKNAPTPQEFREGEDAVIVCDVVSSLPPTIIWKHKGRDVILKKDVRFIVLSNNYLQIRGIKKTDEGTYRCEGRILARGEINFKDIQVIVNVPPTIQARQNIVNATANLGQSVTLVCDAEGFPEPTMSWTKDGEQIEQEEDDEKYIFSDDSSQLTIKKVDKNDEAEYICIAENKAGEQDATIHLKVFAKPKITYVENQTAMELEEQVTLTCEASGDPIPSITWRTSTRNISSEEKTLDGHMVVRSHARVSSLTLKSIQYTDAGEYICTASNTIGQDSQSMYLEVQYAPKLQGPVAVYTWEGNQVNITCEVFAYPSATISWFRDGQLLPSSNYSNIKIYNTPSASYLEVTPDSENDFGNYNCTAVNRIGQESLEFILVQADTPSSPSIDQVEPYSSTAQVQFDEPEATGGVPILKYKAEWRAVGEEVWHSKWYDAKEASMEGIVTIVGLKPETTYAVRLAALNGKGLGEISAASEFKTQPVREPSAPKLEGQMGEDGNSIKVNLIKQDDGGSPIRHYLVRYRALSSEWKPEIRLPSGSDHVMLKSLDWNAEYEVYVVAENQQGKSKAAHFVFRTSAQPTAIPATLGGNSASYTFVSLLFSAVTLLLLC

SEQ ID NO: 401 - protein, 1231 aa, Homo sapiens
MVLLWEPAGAWLALGLALALGPSVAAAAPRQDCTGVECPPLENCIEEALEPGACCATCVQQGCACEGYQYYDCLQGGFVRGRVPAGQSYFVDFGSTECSCPPGGGKISCQFMLCPELPPNCIEAVVVADSCPQCGQVGCVHAGHKYAAGHTVHLPPCRACHCPDAGGELICYQLPGCHGNFSDAEEGDPERHYEDPYSYDQEVAEVEAATALGGEVQAGAVQAGAGGPPAALGGGSQPLSTIQAPPWPAVLPRPTAAAALGPPAPVQAKARRVTEDSEEEEEEEEEREEMAVTEQLAAGGHRGLDGLPTTAPAGPSLPIQEERAEAGARAEAGARPEENLILDAQATSRSTGPEGVTHAPSLGKAALVPTQAVPGSPRDPVKPSPHNILSTSLPDAAWIPPTREVPRKPQVLPHSHVEEDTDPNSVHSIPRSSPEGSTKDLIETCCAAGQQWAIDNDECLEIPESGTEDNVCRTAQRHCCVSYLQEKSCMAGVLGAKEGETCGAEDNDSCGISLYKQCCDCCGLGLRVRAEGQSCESNPNLGYPCNHVMLSCCEGEEPLIVPEVRRPPEPAAAPRRVSEAEMAGREALSLGTEAELPNSLPGDDQDECLLLPGELCQHLCINTVGSYHCACFPGFSLQDDGRTCRPEGHPPQPEAPQEPALKSEFSQVASNTIPLPLPQPNTCKDNGPCKQVCSTVGGSAICSCFPGYAIMADGVSCEDQDECLMGAHDCSRRQFCVNTLGSFYCVNHTVLCADGYILNAHRKCVDINECVTDLHTCSRGEHCVNTLGSFHCYKALTCEPGYALKDGECEDVDECAMGTHTCQPGFLCQNTKGSFYCQARQRCMDGFLQDPEGNCVDINECTSLSEPCRPGFSCINTVGSYTCQRNPLICARGYHASDDGTKCVDVNECETGVHRCGEGQVCHNLPGSYRCDCKAGFQRDAFGRGCIDVNECWASPGRLCQHTCENTLGSYRCSCASGFLLAADGKRCEDVNECEAQRCSQECANIYGSYQCYCRQGYQLAEDGHTCTDIDECAQGAGILCTFRCLNVPGSYQCACPEQGYTMTANGRSCKDVDECALGTHNCSEAETCHNIQGSFRCLRFECPPNYVQVSKTKCERTTCHDFLECQNSPARITHYQLNFQTGLLVPAHIFRIGPAPAFTGDTIALNIIKGNEEGYFGTRRLNAYTGVVYLQRAVLEPRDFALDVEMKLWRQGSVTTFLAKMHIFFTTFAL

SEQ ID NO: 402 - protein, 234 aa, Homo sapiens
MLLAWVQAFLVSNMLLAEAYGSGGCFWDNGHLYREDQTSPAPGLRCLNWLDAQSGLASAPVSGAGNHSYCRNPDEDPRGPWCYVSGEAGVPEKRPCEDLRCPETTSQALPAFTTEIQEASEGPGADEVQVFAPANALPARSEAAAVQPVIGISQRVRMNSKEKKDLGTLGYVLGITMMVIIIAIGAGIILGYSYKRSVASLLGPLRRRGGRYTKSNFVAFLPKRKQDVENQLKM

SEQ ID NO: 403 - protein, 903 aa, Homo sapiens
MVLAQGLLSMALLALCWERSLAGAEETIPLQTLRCYNDYTSHITCRWADTQDAQRLVNVTLIRRVNEDLLEPVSCDLSDDMPWSACPHPRCVPRRCVIPCQSFVVTDVDYFSFQPDRPLGTRLTVTLTQHVQPPEPRDLQISTDQDHFLLTWSVALGSPQSHWLSPGDLEFEVVYKRLQDSWEDAAILLSNTSQATLGPEHLMPSSTYVARVRTRLAPGSRLSGRPSKWSPEVCWDSQPGDEAQPQNLECFFDGAAVLSCSWEVRKEVASSVSFGLFYKPSPDAGSAVLLREEECSPVLREGLGSLHTRHHCQIPVPDPATHGQYIVSVQPRRAEKHIKSSVNIQMAPPSLNVTKDGDSYSLRWETMKMRYEHIDHTFEIQYRKDTATWKDSKTETLQNAHSMALPALEPSTRYWARVRVRTSRTGYNGIWSEWSEARSWDTESVLPMWVLALIVIFLTIAVLLALRFCGIYGYRLRRKWEEKIPNPSKSHLFQNGSAELWPPGSMSAFTSGSPPHQGPWGSRFPELEGVFPVGFGDSEVSPLTIEDPKHVCDPPSGPDTTPAASDLPTEQPPSPQPGPPAASHTPEKQASSFDFNGPYLGPPHSRSLPDILGQPEPPQEGGSQKSPPPGSLEYLCLPAGGQVQLVPLAQAMGPGQAVEVERRPSQGAAGSPSLESGGGPAPPALGPRVGGQDQKDSPVAIPMSSGDTEDPGVASGYVSSADLVFTPNSGASSVSLVPSLGLPSDQTPSLCPGLASGPPGAPGPVKSGFEGYVELPPIEGRSPRSPRNNPVPPEAKSPVLNPGERPADVSPTSPQPEGLLVLQQVGDYCFLPGLGPGPLSLRSKPSSPGPGPEIKNLDQAFQVKKPPGQAVPQVPVIQLFKALKQQDYLSLPPWEVNKPGEVC

SEQ ID NO: 404 - protein, 284 aa, Homo sapiens
MAGGRHRRVVGTLHLLLLVAALPWASRGVSPSASAWPEEKHIMQRIQRLQADWVLEIDTFLSQTPYGYRSFSNIISTLNPTAKRHLVLACHYDSKYFSHWNNRVFVGATDSAVPCAMMLELARALDKKLLSLKTVSDSKPDLSLQLIFFDGEEAFLHWSPQDSLYGSRHLAAKMASTPHPPGARGTSQLHGMDLLVLLDLIGAPNPTFPNFFPNSARWFERLQAIEHELHELGLLKDHSLEGRYFQNYSYGGVIQDDHIPFLRRGVPVLHLIPSPFPEVWHTMD

SEQ ID NO: 405 - protein, 95 aa, Homo sapiens
MCCTKSLLLAALMSVLLLHLCGESEASNFDCCLGYTDRILHPKFIVGFTRQLANEGCDINAIIFHTKKKLSVCANPKQTWVKYIVRLLSKKVKNM

SEQ ID NO: 406 - protein, 949 aa, Homo sapiens
MAGIFYFALFSCLFGICDAVTGSRVYPANEVTLLDSRSVQGELGWIASPLEGGWEEVSIMDEKNTPIRTYQVCNVMEPSQNNWLRTDWITREGAQRVYIEIKFTLRDCNSLPGVMGTCKETFNLYYYESDNDKERFIRENQFVKIDTIAADESFTQVDIGDRIMKLNTEIRDVGPLSKKGFYLAFQDVGACIALVSVRVFYKKCPLTVRNLAQFPDTITGADTSSLVEVRGSCVNNSEEKDVPKMYCGADGEWLVPIGNCLCNAGHEERSGECQACKIGYYKALSTDATCAKCPPHSYSVWEGATSCTCDRGFFRADNDAASMPCTRPPSAPLNLISNVNETSVNLEWSSPQNTGGRQDISYNVVCKKCGAGDPSKCRPCGSGVHYTPQQNGLKTTKVSITDLLAHTNYTFEIWAVNGVSKYNPNPDQSVSVTVTTNQAAPSSIALVQAKEVTRYSVALAWLEPDRPNGVILEYEVKYYEKDQNERSYRIVRTAARNTDIKGLNPLTSYVFHVRARTAAGYGDFSEPLEVTTNTVPSRIIGDGANSTVLLVSVSGSVVLVVILIAAFVISRRRSKYSKAKQEADEEKHLNQGVRTYVDPFTYEDPNQAVREFAKEIDASCIKIEKVIGVGEFGEVCSGRLKVPGKREICVAIKTLKAGYTDKQRRDFLSEASIMGQFDHPNIIHLEGVVTKCKPVMIITEYMENGSLDAFLRKNDGRFTVIQLVGMLRGIGSGMKYLSDMSYVHRDLAARNILVNSNLVCKVSDFGMSRVLEDDPEAAYTTRGGKIPIRWTAPEAIAYRKFTSASDVWSYGIVMWEVMSYGERPYWDMSNQDVIKAIEEGYRLPPPMDCPIALHQLMLDCWQKERSDRPKFGQIVNMLDKLIRNPNSLKRTGTESSRPNTALLDPSSPEFSAVVSVGDWLQAIKMDRYKDNFTAAGYTTLEAVVHVNQE

SEQ ID NO: 407 - protein, 569 aa, Homo sapiens
MKVLLRLICFIALLISSLEADKCKEREEKIILVSSANEIDVRPCPLNPNEHKGTITWYKDDSKTPVSTEQASRIHQHKEKLWFVPAKVEDSGHYYCVVRNSSYCLRIKISAKFVENEPNLCYNAQAIFKQKLPVAGDGGLVCPYMEFFKNENNELPKLQWYKDCKPLLLDNIHFSGVKDRLIVMNVAEKHRGNYTCHASYTYLGKQYPITRVIEFITLEENKPTRPVIVSPANETMEVDLGSQIQLICNVTGQLSDIAYWKWNGSVIDEDDPVLGEDYYSVENPANKRRSTLITVLNISEIESRFYKHPFTCFAKNTHGIDAAYIQLIYPVTNFQKHMIGICVTLTVIIVCSVFIYKIFKIDIVLWYRDSCYDFLPIKASDGKTYDAYILYPKTVGEGSTSDCDIFVFKVLPEVLEKQCGYKLFIYGRDDYVGEDIVEVINENVKKSRRLIIILVRETSGFSWLGGSSEEQIAMYNALVQDGIKVVLLELEKIQDYEKMPESIKFIKQKHGAIRWSGDFTQGPQSAKTRFWKNVRYHMPVQRRSPSSKHQLLSPATKEKLQREAHVPLG

SEQ ID NO: 408 - protein, 447 aa, Homo sapiens
MKVLLRLICFIALLISSLEADKCKEREEKIILVSSANEIDVRPCPLNPNEHKGTITWYKDDSKTPVSTEQASRIHQHKEKLWFVPAKVEDSGHYYCVVRNSSYCLRIKISAKFVENEPNLCYNAQAIFKQKLPVAGDGGLVCPYMEFFKNENNELPKLQWYKDCKPLLLDNIHFSGVKDRLIVMNVAEKHRGNYTCHASYTYLGKQYPITRVIEFITLEENKPTRPVIVSPANETMEVDLGSQIQLICNVTGQLSDIAYWKWNGSVIDEDDPVLGEDYYSVENPANKRRSTLITVLNISEIESRFYKHPFTCFAKNTHGIDAAYIQLIYPVTNFQKHMIGICVTLTVIIVCSVFIYKIFKIDIVLWYRDSCYDFLPIKASDGKTYDAYILYPKTVGEGSTSDCDIFVFKVLPEVLEKQCGYKLFIYGRDDYVGEGMCVMEQSKGLLL

SEQ ID NO: 409 - protein, 538 aa, Homo sapiens
MKVLLRLICFIALLISSLEADKCKEREEKIILVSSANEIDVRPCPLNPNEHKGTITWYKDDSKTPVSTEQASRIHQHKEKLWFVPAKVEDSGHYYCVVRNSSYCLRIKISAKFVENEPNLCYNAQAIFKQKLPVAGDGGLVCPYMEFFKNENNELPKLQWYKDCKPLLLDNIHFSGVKDRLIVMNVAEKHRGNYTCHASYTYLGKQYPITRVIEFITLEENKPTRPVIVSPANETMEVDLGSQIQLICNVTGQLSDIAYWKWNGSVIDEDDPVLGEDYYSVENPANKRRSTLITVLNISEIESRFYKHPFTCFAKNTHGIDAAYIQLIYPVTNFQKHMIGICVTLTVIIVCSVFIYKIFKIDIVLWYRDSCYDFLPIKVLPEVLEKQCGYKLFIYGRDDYVGEDIVEVINENVKKSRRLIIILVRETSGFSWLGGSSEEQIAMYNALVQDGIKVVLLELEKIQDYEKMPESIKFIKQKHGAIRWSGDFTQGPQSAKTRFWKNVRYHMPVQRRSPSSKHQLLSPATKEKLQREAHVPLG

SEQ ID NO: 410 - protein, 1091 aa, Homo sapiens
MAAAGQLCLLYLSAGLLSRLGAAFNLDTREDNVIRKYGDPGSLFGFSLAMHWQLQPEDKRLLLVGAPRAEALPLQRANRTGGLYSCDITARGPCTRIEFDNDADPTSESKEDQWMGVTVQSQGPGGKVVTCAHRYEKRQHVNTKQESRDIFGRCYVLSQNLRIEDDMDGGDWSFCDGRLRGHEKFGSCQQGVAATFTKDFHYIVFGAPGTYNWKGIVRVEQKNNTFFDMNIFEDGPYEVGGETEHDESLVPVPANSYLGFSLDSGKGIVSKDEITFVSGAPRANHSGAVVLLKRDMKSAHLLPEHIFDGEGLASSFGYDVAVVDLNKDGWQDIVIGAPQYFDRDGEVGGAVYVYMNQQGRWNNVKPIRLNGTKDSMFGIAVKNIGDINQDGYPDIAVGAPYDDLGKVFIYHGSANGINTKPTQVLKGISPYFGYSIAGNMDLDRNSYPDVAVGSLSDSVTIFRSRPVINIQKTITVTPNRIDLRQKTACGAPSGICLQVKSCFEYTANPAGYNPSISIVGTLEAEKERRKSGLSSRVQFRNQGSEPKYTQELTLKRQKQKVCMEETLWLQDNIRDKLRPIPITASVEIQEPSSRRRVNSLPEVLPILNSDEPKTAHIDVHFLKEGCGDDNVCNSNLKLEYKFCTREGNQDKFSYLPIQKGVPELVLKDQKDIALEITVTNSPSNPRNPTKDGDDAHEAKLIATFPDTLTYSAYRELRAFPEKQLSCVANQNGSQADCELGNPFKRNSNVTFYLVLSTTEVTFDTPDLDINLKLETTSNQDNLAPITAKAKVVIELLLSVSGVAKPSQVYFGGTVVGEQAMKSEDEVGSLIEYEFRVINLGKPLTNLGTATLNIQWPKEISNGKWLLYLVKVESKGLEKVTCEPQKEINSLNLTESHNSRKKREITEKQIDDNRKFSLFAERKYQTLNCSVNVNCVNIRCPLRGLDSKASLILRSRLWNSTFLEEYSKLNYLDILMRAFIDVTAAAENIRLPNAGTQVRVTVFPSKTVAQYSGVPWWIILVAILAGILMLALLVFILWKCGFFKRSRYDDSVPRYHAVRIRKEEREIKDEKYIDNLEKKQWITKWNENESYS

SEQ ID NO: 411 - protein, 977 aa, Homo sapiens
MGPPLPLLLLLLLLLPPRVLPAAPSSVPRGRQLPGRLGCLLEEGLCGASEACVNGFTWQDDYTQYVMDQELADLPKTYLRRPEASSPARPSKHSVGSERRYSREGGAALANALRRHLPFLEALSQAPASDVLARTHTAQDRPPAEGDDRFSESILTYVAHTSALTYPPGSRTQLREDLLPRTLGQLQPDELSPKVDSGVDRHHLMAALSAYAAQRPPAPPGEGSLEPQYLLRAPSRMPRPLLAPAAPQKWPSPLGDSEDPSSTGDGARIHTLLKDLQRQPAEVRGLSGLELDGMAELMAGLMQGVDHGVARGSPGRAALGESGEQADGPKATLRGDSFPDDGVQDDDDRLYQEVHRLSATLGGLLQDHGSRLLPGALPFARPLDMERKKSEHPESSLSSEEETAGVENVKSQTYSKDLLGQQPHSEPGAAAFGELQNQMPGPSKEEQSLPAGAQEALSDGLQLEVQPSEEEARGYIVTDRDPLRPEEGRRLVEDVARLLQVPSSAFADVEVLGPAVTFKVSANVQNVTTEDVEKATVDNKDKLEETSGLKILQTGVGSKSKLKFLPPQAEQEDSTKFIALTLVSLACILGVLLASGLIYCLRHSSQHRLKEKLSGLGGDPGADATAAYQELCRQRMATRPPDRPEGPHTSRISSVSSQFSDGPIPSPSARSSASSWSEEPVQSNMDISTGHMILSYMEDHLKNKNRLEKEWEALCAYQAEPNSSFVAQREENVPKNRSLAVLTYDHSRVLLKAENSHSHSDYINASPIMDHDPRNPAYIATQGPLPATVADFWQMVWESGCVVIVMLTPLAENGVRQCYHYWPDEGSNLYHIYEVNLVSEHIWCEDFLVRSFYLKNLQTNETRTVTQFHFLSWYDRGVPSSSRSLLDFRRKVNKCYRGRSCPIIVHCSDGAGRSGTYVLIDMVLNKMAKGAKEIDIAATLEHLRDQRPGMVQTKEQFEFALTAVAEEVNAILKALPQ

SEQ ID NO: 412 - protein, 219 aa, Homo sapiens
MVTSSFPISVAVFALITLQVGTQDSFIAAVYEHAVILPNKTETPVSQEDALNLMNENIDILETAIKQAAEQGARIIVTPEDALYGWKFTRETVFPYLEDIPDPQVNWIPCQDPHRFGHTPVQARLSCLAKDNSIYVLANLGDKKPCNSRDSTCPPNGYFQYNTNVVYNTEGKLVARYHKYHLYSEPQFNVPEKPELVTFNTAFGRKWYLCTKWSQSVSL

SEQ ID NO: 413 - protein, 1428 aa, Homo sapiens
MQGPPLLTAAHLLCVCTAALAVAPGPRFLVTAPGIIRPGGNVTIGVELLEHCPSQVTVKAELLKTASNLTVSVLEAEGVFEKGSFKTLTLPSLPLNSADEIYELRVTGRTQDEILFSNSTRLSFETKRISVFIQTDKALYKPKQEVKFRIVTLFSDFKPYKTSLNILIKDPKSNLIQQWLSQQSDLGVISKTFQLSSHPILGDWSIQVQVNDQTYYQSFQVSEYVLPKFEVTLQTPLYCSMNSKHLNGTITAKYTYGKPVKGDVTLTFLPLSFWGKKKNITKTFKINGSANFSFNDEEMKNVMDSSNGLSEYLDLSSPGPVEILTTVTESVTGISRNVSTNVFFKQHDYIIEFFDYTTVLKPSLNFTATVKVTRADGNQLTLEERRNNVVITVTQRNYTEYWSGSNSGNQKMEAVQKINYTVPQSGTFKIEFPILEDSSELQLKAYFLGSKSSMAVHSLFKSPSKTYIQLKTRDENIKVGSPFELVVSGNKRLKELSYMVVSRGQLVAVGKQNSTMFSLTPENSWTPKACVIVYYIEDDGEIISDVLKIPVQLVFKNKIKLYWSKVKAEPSEKVSLRISVTQPDSIVGIVAVDKSVNLMNASNDITMENVVHELELYNTGYYLGMFMNSFAVFQECGLWVLTDANLTKDYIDGVYDNAEYAERFMEENEGHIVDIHDFSLGSSPHVRKHFPETWIWLDTNMGYRIYQEFEVTVPDSITSWVATGFVISEDLGLGLTTTPVELQAFQPFFIFLNLPYSVIRGEEFALEITIFNYLKDATEVKVIIEKSDKFDILMTSNEINATGHQQTLLVPSEDGATVLFPIRPTHLGEIPITVTALSPTASDAVTQMILVKAEGIEKSYSQSILLDLTDNRLQSTLKTLSFSFPPNTVTGSERVQITAIGDVLGPSINGLASLIRMPYGCGEQNMINFAPNIYILDYLTKKKQLTDNLKEKALSFMRQGYQRELLYQREDGSFSAFGNYDPSGSTWLSAFVLRCFLEADPYIDIDQNVLHRTYTWLKGHQKSNGEFWDPGRVIHSELQGGNKSPVTLTAYIVTSLLGYRKYQPNIDVQESIHFLESEFSRGISDNYTLALITYALSSVGSPKAKEALNMLTWRAEQEGGMQFWVSSESKLSDSWQPRSLDIEVAAYALLSHFLQFQTSEGIPIMRWLSRQRNSLGGFASTQDTTVALKALSEFAALMNTERTNIQVTVTGPSSPSPLAVVQPTAVNISANGFGFAICQLNVVYNVKASGSSRRRRSIQNQEAFDLDVAVKENKDDLNHVDLNVCTSFSGPGRSGMALMEVNLLSGFMVPSEAISLSETVKKVEYDHGKLNLYLDSVNETQFCVNIPAVRNFKVSNTQDASVSIVDYYEPRRQAVRSYNSEVKLSSCDLCSDVQGCRPCEDGASGSHHHSSVIFIFCFKLLYFMELWL

SEQ ID NO: 414 - protein, 801 aa, Homo sapiens
MNLQPIFWIGLISSVCCVFAQTDENRCLKANAKSCGECIQAGPNCGWCTNSTFLQEGMPTSARCDDLEALKKKGCPPDDIENPRGSKDIKKNKNVTNRSKGTAEKLKPEDITQIQPQQLVLRLRSGEPQTFTLKFKRAEDYPIDLYYLMDLSYSMKDDLENVKSLGTDLMNEMRRITSDFRIGFGSFVEKTVMPYISTTPAKLRNPCTSEQNCTSPFSYKNVLSLTNKGEVFNELVGKQRISGNLDSPEGGFDAIMQVAVCGSLIGWRNVTRLLVFSTDAGFHFAGDGKLGGIVLPNDGQCHLENNMYTMSHYYDYPSIAHLVQKLSENNIQTIFAVTEEFQPVYKELKNLIPKSAVGTLSANSSNVIQLIIDAYNSLSSEVILENGKLSEGVTISYKSYCKNGVNGTGENGRKCSNISIGDEVQFEISITSNKCPKKDSDSFKIRPLGFTEEVEVILQYICECECQSEGIPESPKCHEGNGTFECGACRCNEGRVGRHCECSTDEVNSEDMDAYCRKENSSEICSNNGECVCGQCVCRKRDNTNEIYSGKFCECDNFNCDRSNGLICGGNGVCKCRVCECNPNYTGSACDCSLDTSTCEASNGQICNGRGICECGVCKCTDPKFQGQTCEMCQTCLGVCAEHKECVQCRAFNKGEKKDTCTQECSYFNITKVESRDKLPQPVQPDPVSHCKEKDVDDCWFYFTYSVNGNNEVMVHVVENPECPTGPDIIPIVAGVVAGIVLIGLALLLIWKLLMIIHDRREFAKFEKEKMNAKWDTQENPIYKSPINNFKNPNYGRKAGL

SEQ ID NO: 415 - protein, 113 aa, Homo sapiens
MTLLWCVVSLYFYGILQSDASERCDDWGLDTMRQIQVFEDEPARIKCPLFEHFLKFNYSTAHSAGLTLIWYWTRQDRDLEEPINFRLPENRISKEKDVLWFRPTLLNDTGNYT

SEQ ID NO: 416 - protein, 204 aa, Homo sapiens
MKLWVSALLMAWFGVLSCVQAEFFTSIGHMTDLIYAEKELVQSLKEYILVEEAKLSKIKSWANKMEALTSKSAADAEGYLAHPVNAYKLVKRLNTDWPALEDLVLQDSAAGFIANLSVQRQFFPTDEDEIGAAKALMRLQDTYRLDPGTISRGELPGTKYQAMLSVDDCFGMGRSAYNEGDYYHTVLWMEQVLKQLDAGEEATT

SEQ ID NO: 417 - protein, 195 aa, Homo sapiens
MAQLCGLRRSRAFLALLGSLLLSGVLAADRERSIHENATGDLATSRNAADSSVPSAPRRQDSEDHSSDMFNYEEYCTANAVTGPCRASFPRWYFDVERNSCNNFIYGGCRGNKNSYRSEEACMLRCFRQQENPPLPLGSKVVVLAGLFVMVLILFLGASMVYLIRVARRNQERALRTVWSSGDDKEQLVKNTYVL

SEQ ID NO: 418 - protein, 179 aa, Homo sapiens
MPPPRTGRGLLWLGLVLSSVCVALGSETQANSTTDALNVLLIIVDDLRPSLGCYGDKLVRSPNIDQLASHSLLFQNAFAQQAVCAPSRVSFLTGRRPDTTRLYDFNSYWRVHAGNFSTIPQYFKENGYVTMSVGKVFHPGTAPCPESGFSWFVVSESSIPILGMGLSLQSPLLAGRVPR

SEQ ID NO: 419 - protein, 431 aa, Homo sapiens
MQLKIMPKKKRLSAGRVPLILFLCQMISALEVPLDLVQPPTITQQSPKDYIIDPRENIVIQCEAKGKPPPSFSWTRNGTHFDIDKDPLVTMKPGTGTLIINIMSEGKAETYEGVYQCTARNERGAAVSNNIVVRPSRSPLWTKEKLEPITLQSGQSLVLPCRPPIGLPPPIIFWMDNSFQRLPQSERVSQGLNGDLYFSNVLPEDTREDYICYARFNHTQTIQQKQPISVKVISVDELNDTIAANLSDTEFYGAKSSRERPPTFLTPEGNASNKEELRGNVLSLECIAEGLPTPIIYWAKEDGMLPKNRTVYKNFEKTLQIIHVSEADSGNYQCIAKNALGAIHHTISVRVKAAPYWITAPQNLVLSPGEDGTLICRANGNPKPRISWLTNGVPIEIAPDDPSRKIDGDTIIFSNVQERSSAVYQCNASNE

SEQ ID NO: 420 - protein, 227 aa, Homo sapiens
MALQIPGGFWAAAVTVMLVMLSTPVAEARDFPKDFLVQFKGMCYFTNGTERVRGVARYIYNREEYGRFDSDVGEFQAVTELGRSIEDWNNYKDFLEQERAAVDKVCRHNYEAELRTTLQRQVEPTVTISPSRTEALNHHNLLVCSVTDFYPAQIKVRWFRNDQEETAGVVSTSLIRNGDWTFQILVMLEITPQRGDIYTCQVEHPSLQSPITVEWRPRGPPPAGLLH

SEQ ID NO: 421 - protein, 816 aa, Homo sapiens
MESRVLLRTFCLIFGLGAVWGLGVDPSLQIDVLTELELGESTTGVRQVPGLHNGTKAFLFQDTPRSIKASTATAEQFFQKLRNKHEFTILVTLKQTHLNSGVILSIHHLDHRYLELESSGHRNEVRLHYRSGSHRPHTEVFPYILADDKWHKLSLAISASHLILHIDCNKIYERVVEKPSTDLPLGTTFWLGQRNNAHGYFKGIMQDVQLLVMPQGFIAQCPDLNRTCPTCNDFHGLVQKIMELQDILAKTSAKLSRAEQRMNRLDQCYCERTCTMKGTTYREFESWIDGCKNCTCLNGTIQCETLICPNPDCPLKSALAYVDGKCCKECKSICQFQGRTYFEGERNTVYSSSGVCVLYECKDQTMKLVESSGCPALDCPESHQITLSHSCCKVCKGYDFCSERHNCMENSICRNLNDRAVCSCRDGFRALREDNAYCEDIDECAEGRHYCRENTMCVNTPGSFMCICKTGYIRIDDYSCTEHDECITNQHNCDENALCFNTVGGHNCVCKPGYTGNGTTCKAFCKDGCRNGGACIAANVCACPQGFTGPSCETDIDECSDGFVQCDSRANCINLPGWYHCECRDGYHDNGMFSPSGESCEDIDECGTGRHSCANDTICFNLDGGYDCRCPHGKNCTGDCIHDGKVKHNGQIWVLENDRCSVCSCQNGFVMCRRMVCDCENPTVDLFCCPECDPRLSSQCLHQNGETLYNSGDTWVQNCQQCRCLQGEVDCWPLPCPDVECEFSILPENECCPRCVTDPCQADTIRNDITKTCLDEMNVVRFTGSSWIKHGTECTLCQCKNGHICCSVDPQCLQEL

SEQ ID NO: 422 - protein, 286 aa, Homo sapiens
MSPHPTALLGLVLCLAQTIHTQEDLPRPSISAEPGTVIPLGSHVTFVCRGPVGVQTFRLERDSRSTYNDTEDVSQASPSESEARFRIDSVREGNAGLYRCIYYKPPKWSEQSDYLELLVKESSGGPDSPDTEPGSSAGPTQRPSDNSHNEHAPASQGLKAEHLYILIGVSVVFLFCLLLLVLFCLHRQNQIKQGPPRSKDEEQKPQQRPDLAVDVLERTADKATVNGLPEKDRETDTSALAAGSSQEVTYAQLDHWALTQRTARAVSPQSTKPMAESITYAAVARH

SEQ ID NO: 423 - protein, 238 aa, Homo sapiens
MRVTLATIAWMVSFVSNYSHTANILPDIENEDFIKDCVRIHNKFRSEVKPTASDMLYMTWDPALAQIAKAWASNCQFSHNTRLKPPHKLHPNFTSLGENIWTGSVPIFSVSSAITNWYDEIQDYDFKTRICKKVCGHYTQVSQERGRDPNPKRGFLNLARENPGLFGQIVTKLAAQFNFALKFLALTLFPMEHILYATTDQEGITQLGHIREEPPAVPAPIMTSVWTISVLTDSETKS

SEQ ID NO: 424 - protein, 723 aa, Homo sapiens
MWVTKLLPALLLQHVLLHLLLLPIAIPYAEGQRKRRNTIHEFKKSAKTTLIKIDPALKIKTKKVNTADQCANRCTRNKGLPFTCKAFVFDKARKQCLWFPFNSMSSGVKKEFGHEFDLYENKDYIRNCIIGKGRSYKGTVSITKSGIKCQPWSSMIPHEHSYRGKDLQENYCRNPRGEEGGPWCFTSNPEVRYEVCDIPQCSEVECMTCNGESYRGLMDHTESGKICQRWDHQTPHRHKFLPERYPDKGFDDNYCRNPDGQPRPWCYTLDPHTRWEYCAIKTCADNTMNDTDVPLETTECIQGQGEGYRGTVNTIWNGIPCQRWDSQYPHEHDMTPENFKCKDLRENYCRNPDGSESPWCFTTDPNIRVGYCSQIPNCDMSHGQDCYRGNGKNYMGNLSQTRSGLTCSMWDKNMEDLHRHIFWEPDASKLNENYCRNPDDDAHGPWCYTGNPLIPWDYCPISRCEGDTTPTIVNLDHPVISCAKTKQLRVVNGIPTRTNIGWMVSLRYRNKHICGGSLIKESWVLTARQCFPSRDLKDYEAWLGIHDVHGRGDEKCKQVLNVSQLVYGPEGSDLVLMKLARPAVLDDFVSTIDLPNYGCTIPEKTSCSVYGWGYTGLINYDGLLRVAHLYIMGNEKCSQHHRGKVTLNESEICAGAEKIGSGPCEGDYGGPLVCEQHKMRMVLGVIVPGRGCAIPNRPGIFVRVAYYAKWIHKIILTYKVPQS

SEQ ID NO: 425 - protein, 38 aa, Homo sapiens
MAGIFYFALFSCLFGICDAVTGSRVYPANEVGGSEYHG

SEQ ID NO: 426 - protein, 122 aa, Homo sapiens
MLSLLHTSTLAVLGALCVYGAGHLEQPQISSTKTLSKTARLECVVSGITISATSVYWYRERPGEVIQFLVSISYDGTVRKESGIPSGKFEVDRIPETSTSTLTIHNVEKQDIATYYCALWEV

SEQ ID NO: 427 - protein, 734 aa, Homo sapiens
MGCWGQLLVWFGAAGAILCSSPGSQETFLRSSPLPLASPSPRDPKVSAPPSILEPASPLNSPGTEGSWLFSTCGASGRHGPTQTQCDGAYAGTSVVVTVGAAGQLRGVQLWRVPGPGQYLISAYGAAGGKGAKNHLSRAHGVFVSAIFSLGLGESLYILVGQQGEDACPGGSPESQLVCLGESRAVEEHAAMDGSEGVPGSRRWAGGGGGGGGATYVFRVRAGELEPLLVAAGGGGRAYLRPRDRGRTQASPEKLENRSEAPGSGGRGGAAGGDASETDNLWADGEDGVSFIHPSSELFLQPLAVTENHGEVEIRRHLNCSHCPLRDCQWQAELQLAECLCPEGMELAVDNVTCMDLHKPPGPLVLMVAVVATSTLSLLMVCGVLILGGAWPGPVLASATRCHRGFPSQCYSAQTLPELCSPQDELDFLMEALIISKFRHQNIVRCVGLSLRATPRLILLELMSGGDMKSFLRHSRPHLGQPSPLVMRDLLQLAQDIAQGCHYLEENHFIHRDIAARNCLLSCAGPSRVAKIGDFGMARDIYRASYYRRGDRALLPVKWMPPEAFLEGIFTSKTDSWSFGVLLWEIFSLGYMPYPGRTNQEVLDFVVGGGRMDPPRGCPGPVYRIMTQCWQHEPELRPSFASILERLQYCTQDPDVLNSLLPMELGPTPEEEGTSGLGNRSLECLRPPQPQELSPEKLKSWGGSPLGPWLSSGLKPLKSRGLQPQNLWNPTYRS

SEQ ID NO: 428 - protein, 691 aa, Homo sapiens
MGQGWATAGLPSLLFLLLCYGHPLLVPSQEASQQVTVTHGTSSQATTSSQTTTHQATAHQTSAQSPNLVTDEAEASKFVEEYDRTSQVVWNEYAEANWNYNTNITTETSKILLQKNMQIANHTLKYGTQARKFDVNQLQNTTIKRIIKKVQDLERAALPAQELEEYNKILLDMETTYSVATVCHPNGSCLQLEPDLTNVMATSRKYEDLLWAWEGWRDKAGRAILQFYPKYVELINQAARLNGYVDAGDSWRSMYETPSLEQDLERLFQELQPLYLNLHAYVRRALHRHYGAQHINLEGPIPAHLLGNMWAQTWSNIYDLVVPFPSAPSMDTTEAMLKQGWTPRRMFKEADDFFTSLGLLPVPPEFWNKSMLEKPTDGREVVCHASAWDFYNGKDFRIKQCTTVNLEDLVVAHHEMGHIQYFMQYKDLPVALREGANPGFHEAIGDVLALSVSTPKHLHSLNLLSSEGGSDEHDINFLMKMALDKIAFIPFSYLVDQWRWRVFDGSITKENYNQEWWSLRLKYQGLCPPVPRTQGDFDPGAKFHIPSSVPYIRTAMKLGFSRPWPEAMQLITGQPNMSASAMLSYFKPLLDWLRTENELHGEKLGWPQYNWTPNSARSEGPLPDSGRVSFLGLDLDAQQARVGQWLLLFLGIALLVATLGLSQRLFSIRHRSLHRHSHGPQFGSEVELRHS

SEQ ID NO: 429 - protein, 246 aa, Homo sapiens
MAAKVFESIGKFGLALAVAGGVVNSALYNVDAGHRAVIFDRFRGVQDIVVGEGTHFLIPWVQKPIIFDCRSRPRNVPVITGSKDLQNVNITLRILFRPVASQLPRIFTSIGEDYDERVLPSITTEILKSVVARFDAGELITQRELVSRQVSDDLTERAATFGLILDDVSLTHLTFGKEFTEAVEAKQVAQQEAERARFVVEKAEQQKKAAIISAEGDSKAAELIANSLATAGDGLIELRKLEAAED

SEQ ID NO: 430 - protein, 1086 aa, Homo sapiens
MAAAGQLCLLYLSAGLLSRLGAAFNLDTREDNVIRKYGDPGSLFGFSLAMHWQLQPEDKRLLLVGAPRAEALPLQRANRTGGLYSCDITARGPCTRIEFDNDADPTSESKEDQWMGVTVQSQGPGGKVVTCAHRYEKRQHVNTKQESRDIFGRCYVLSQNLRIEDDMDGGDWSFCDGRLRGHEKFGSCQQGVAATFTKDFHYIVFGAPGTYNWKGLLFLTSVSYTDPDQFVYKTRPPREQPDTFPDVMMNSYLGFSLDSGKGIVSKDEITFVSGAPRANHSGAVVLLKRDMKSAHLLPEHIFDGEGLASSFGYDVAVVDLNKDGWQDIVIGAPQYFDRDGEVGGAVYVYMNQQGRWNNVKPIRLNGTKDSMFGIAVKNIGDINQDGYPDIAVGAPYDDLGKVFIYHGSANGINTKPTQVLKGISPYFGYSIAGNMDLDRNSYPDVAVGSLSDSVTIFRSRPVINIQKTITVTPNRIDLRQKTACGAPSGICLQVKSCFEYTANPAGYNPSISIVGTLEAEKERRKSGLSSRVQFRNQGSEPKYTQELTLKRQKQKVCMEETLWLQDNIRDKLRPIPITASVEIQEPSSRRRVNSLPEVLPILNSDEPKTAHIDVHFLKEGCGDDNVCNSNLKLEYKFCTREGNQDKFSYLPIQKGVPELVLKDQKDIALEITVTNSPSNPRNPTKDGDDAHEAKLIATFPDTLTYSAYRELRAFPEKQLSCVANQNGSQADCELGNPFKRNSNVTFYLVLSTTEVTFDTPDLDINLKLETTSNQDNLAPITAKAKVVIELLLSVSGVAKPSQVYFGGTVVGEQAMKSEDEVGSLIEYEFRVINLGKPLTNLGTATLNIQWPKEISNGKWLLYLVKVESKGLEKVTCEPQKEINSLNLTESHNSRKKREITEKQIDDNRKFSLFAERKYQTLNCSVNVNCVNIRCPLRGLDSKASLILRSRLWNSTFLEEYSKLNYLDILMRAFIDVTAAAENIRLPNAGTQVRVTVFPSKTVAQYSGVPWWIILVAILAGILMLALLVFILWKCGFFKRSRYDDSVPRYHAVRIRKEEREIKDEKYIDNLEKKQWITKWNENESYS

SEQ ID NO: 431 - protein, 232 aa, Homo sapiens
MWQLLLPTALLLLVSAGMRTDLPKAVVFLEPQWYSVLEKDSVTLKCQGAYSPEDNSTQWFHNENLISSQASSYFIDAATVNDSGEYRCQTNLSTLSDPVQLEVHIGWLLLQAPRWVFKEEDPIHLRCHSWKNTALHKVTYLQNGKDRKYFHHNSDFHIPKATLKDSGSYFCRGLVGSKNVSSETVNITITQGLAVSTISSFSPPGYQVSFCLVMVLLFAVDTGLYFSVKTNI

SEQ ID NO: 432 - protein, 117 aa, Homo sapiens
MEFGLSWVFLVAILKGVQCEVQLVESGGGLVQPGGSLRLSCAASGFTFSSYWMHWVRQAPGKGLVWVSRINSDGSSTSYADSVKGRFTISRDNAKNTLYLQMNSLRAEDTAVYYCAR

SEQ ID NO: 433 - protein, 42 aa, Homo sapiens
MNWHLPLFLLASVTLPSICSHFNPLSLEELGSNTGIQVFNQI

SEQ ID NO: 434 - protein, 101 aa, Homo sapiens
MKLWVSALLMAWFGVLSCVQAEFFTSIGHMTDLIYAEKELVQSLKEYILVEEAKLSKIKSWANKMEALTSKSAADAEGYLAHPVNAYKLVKRLNTDWPALE

SEQ ID NO: 435 - protein, 333 aa, Homo sapiens
KILFLSSIIPFDCLLTVRALGGLLKFLGRRRIGVELEDYNVSVPILGFKKFMLTHLVNIDQDTYSVLQIFKSESHPSVYKVASGLKEGLSLFGILNRCHCKWGEKLLRLWFTRPTHDLGELSSRLDVIQFFLLPQNLDMAQMLHRLLGHIKNVPLILKRMKLSHTKVSDWQVLYKTVYSALGLRDACRSLPQSIQLFRDIAQEFSDDLHHIASLIGKVYLSPQVDFEGSLAENRFTVLPNIDPEIDEKKRRLMGLPSFLTEVARKELENLDSRIPSCSVIYIPLIGFLLSIPRLPSMVEASDFEINGLDFMFLSEEKLHYRSARTKELDALLG

SEQ ID NO: 436 - protein, 177 aa, Homo sapiens
MAGIFYFALFSCLFGICDAVTGSRVYPANEGPPSAPLNLISNVNETSVNLEWSSPQNTGGRQDISYNVVCKKCGAGDPSKCRPCGSGVHYTPQQNGLKTTKVSITDLLAHTNYTFEIWAVNGVSKYNPNPDQSVSVTVTTNQAAPSSIALVQAKEVTRYSVALAWLEPDRPNGVILE

SEQ ID NO: 437 - protein, 264 aa, Homo sapiens
MALQIPGGFWAAAVTVMLVMLSTPVAEARDFPKDFLVQFKGMCYFTNGTERVRGVARYIYNREEYGRFDSDVGEFQAVTELGRSIEDWNNYKDFLEQERAAVDKVCRHNYEAELRTTLQRQVEPTVTISPSRTEALNHHNLLVCSVTDFYPAQIKVRWFRNDQEETAGVVSTSLIRNGDWTFQILVMLEITPQRGDIYTCQVEHPSLQSPITVEWRAQSESAQSKMLSGIGGFVLGLIFLGLGLIIRHRGQKGPRGPPPAGLLH

SEQ ID NO: 438 - protein, 146 aa, Homo sapiens
MKLWVSALLMAWFGVLSCVQAEFFTSIGHMTDLIYAEKELVQSLKEYILVEEAKLSKIKSWANKMEALTSKSAADAEGYLAHPVNAYKLVKRLNTDWPALEDLVLQDSAAGFIANLSVQRQFFPTDEDEIGAAKALMRLQDTYRLD

SEQ ID NO: 439 - protein, 105 aa, Homo sapiens
MWQLLLPTALLLLVSAGMRTDLPKAVVFLEPQWYRVLEKDSVTLKCQGAYSPEDNSTQWFHNESLISSQASSYFIDAATVDDSGEYRCQTNLSTLSDPVQLEVHI

SEQ ID NO: 440 - protein, 378 aa, Homo sapiens
MKMASFLAFLLLNFRVCLLLLQLLMPHSAQFSVLGPSGPILAMVGEDADLPCHLFPTMSAETMELKWVSSSLRQVVNVYADGKEVEDRQSAPYRGRTSILRDGITAGKAALRIHNVTASDSGKYLCYFQDGDFYEKALVELKVAALGSDLHVDVKGYKDGGIHLECRSTGWYPQPQIQWSNNKGENIPTVEAPVVADGVGLYAVAASVIMRGSSGEGVSCTIRSSLLGLEKTASISIADPFFRSAQRWIAALAGTLPVLLLLLGGAGYFLWQQQEEKKTQFRKKKREQELREMAWSTMKQEQSTRVKLLEELRWRSIQYASRGERHSAYNEWKKALFKPGPPIGQTQQQTRGQGSPVALSQESAQRTDSWGPEEGGES

SEQ ID NO: 441 - protein, 254 aa, Homo sapiens
MAPRSLLLLLSGALALTDTWAGSHSLRYFSTAVSRPGRGEPRYIAVEYVDDTQFLRFDSDAAIPRMEPREPWVEQEGPQYWEWTTGYAKANAQTDRVALRNLLRRYNQSEAGSHTLQGMNGCDMGPDGRLLRGYHQHAYDGKDYISLNEDLRSWTAADTVAQITQRFYEAEEYAEEFRTYLEGECLELLRRYLENGKETLQRAEQSPQPTIPIVGIVAGLVVLGAVVTGAVVAAVMWRKKSSDRNRGSYSQAAV

SEQ ID NO: 442 - protein, 687 aa, Homo sapiens
MLTFFLVSGGSLWLFVEFVLSLLEKMQTQEILRILRLPELGDLGQFFRSLSATTLDSGGARRSVIGSGPQLLTHYYDDARTMYQVFRRGLSISGNGPCLGFRKPKQPYQWLSYQEVADRAEFLGSGLLQHNCKACTDQFIGVFAQNRPEWIIVELACYTYSMVVVPLYDTLGPGAIRYIINTADISTVIVDKPQKAVLLLEHVERKETPGLKLIILMDPFEEALKERGQKCGVVIKSMQAVEDCGQENHQAPVPPQPDDLSIVCFTSGTTGNPKGAMLTHGNVVADFSGFLKVTEKVIFPRQDDVLISFLPLAHMFERVIQSVVYCHGGRVGFFQGDIRLLSDDMKALCPTIFPVVPRLLNRMYDKIFSQANTPLKRWLLEFAAKRKQAEVRSGIIRNDSIWDELFFNKIQASLGGCVRMIVTGAAPASPTVLGFLRAALGCQVYEGYGQTECTAGCTFTTPGDWTSGHVGAPLPCNHIKLVDVEELNYWACKGEGEICVRGPNVFKGYLKDPDRTKEALDSDGWLHTGDIGKWLPAGTLKIIDRKKHIFKLAQGEYVAPEKIENIYIRSQPVAQIYVHGDSLKAFLVGIVVPDPEVMPSWAQKRGIEGTYADLCTNKDLKKAILEDMVRLGKESGLHSFEQVKAIHIHSDMFSVQNGLLTPTLKAKRPELREYFKKQIEELYSISM

SEQ ID NO: 443 - protein, 1242 aa, Homo sapiens
MGAASGRRGPGLLLPLPLLLLLPPQPALALDPGLQPGNFSADEAGAQLFAQSYNSSAEQVLFQSVAASWAHDTNITAENARRQEEAALLSQEFAEAWGQKAKELYEPIWQNFTDPQLRRIIGAVRTLGSANLPLAKRQQYNALLSNMSRIYSTAKVCLPNKTATCWSLDPDLTNILASSRSYAMLLFAWEGWHNAAGIPLKPLYEDFTALSNEAYKQDGFTDTGAYWRSWYNSPTFEDDLEHLYQQLEPLYLNLHAFVRRALHRRYGDRYINLRGPIPAHLLGDMWAQSWENIYDMVVPFPDKPNLDVTSTMLQQGWNATHMFRVAEEFFTSLELSPMPPEFWEGSMLEKPADGREVVCHASAWDFYNRKDFRIKQCTRVTMDQLSTVHHEMGHIQYYLQYKDLPVSLRRGANPGFHEAIGDVLALSVSTPEHLHKIGLLDRVTNDTESDINYLLKMALEKIAFLPFGYLVDQWRWGVFSGRTPPSRYNFDWWYLRTKYQGICPPVTRNETHFDAGAKFHVPNVTPYIRYFVSFVLQFQFHEALCKEAGYEGPLHQCDIYRSTKAGAKLRKVLQAGSSRPWQEVLKDMVGLDALDAQPLLKYFQPVTQWLQEQNQQNGEVLGWPEYQWHPPLPDNYPEGIDLVTDEAEASKFVEEYDRTSQVVWNEYAEANWNYNTNITTETSKILLQKNMQIANHTLKYGTQARKFDVNQLQNTTIKRIIKKVQDLERAALPAQELEEYNKILLDMETTYSVATVCHPNGSCLQLEPDLTNVMATSRKYEDLLWAWEGWRDKAGRAILQFYPKYVELINQAARLNGYVDAGDSWRSMYETPSLEQDLERLFQELQPLYLNLHAYVRRALHRHYGAQHINLEGPIPAHLLGNMWAQTWSNIYDLVVPFPSAPSMDTTEAMLKQGWTPRRMFKEADDFFTSLGLLPVPPEFWNKSMLEKPTDGREVVCHASAWDFYNGKDFRIKQCTTVNLEDLVVAHHEMGHIQYFMQYKDLPVALREGANPGFHEAIGDVLALSVSTPKHLHSLNLLSSEGGSDEHDINFLMKMALDKIAFIPFSYLVDQWRWRVFDGSITKENYNQEWWSLRLKYQGLCPPVPRTQGDFDPGAKFHIPSSVPYIRYFVSFIIQFQFHEALCQAAGHTGPLHKCDIYQSKEAGQRLATAMKLGFSRPWPEAMQLITGQPNMSASAMLSYFKPLLDWLRTENELHGEKLGWPQYNWTPNSGTATHPTSSLGS

SEQ ID NO: 444 - protein, 77 aa, Homo sapiens
MRAPGCGRLVLPLLLLAAAALAEGDAKGLKEGETPGNFMEDEQWLSSISQYSGKIKHWNRFRDVPSSDPPSTTQATP

SEQ ID NO: 445 - protein, 692 aa, Homo sapiens
MGPWGWKLRWTVALLLAAAGTAVGDRCERNEFQCQDGKCISYKWVCDGSAECQDGSDESQETCLSVTCKSGDFSCGGRVNRCIPQFWRCDGQVDCDNGSDEQGCLTLCEGPNKFKCHSGECITLDKVCNMARDCRDWSDEPIKECGTNECLDNNGGCSHVCNDLKIGYECLCPDGFQLVAQRRCEDIDECQDPDTCSQLCVNLEGGYKCQCEEGFQLDPHTKACKAVGSIAYLFFTNRHEVRKMTLDRSEYTSLIPNLRNVVALDTEVASNRIYWSDLSQRMICSTQLDRAHGVSSYDTVISRDIQAPDGLAVDWIHSNIYWTDSVLGTVSVADTKGVKRKTLFRENGSKPRAIVVDPVHGFMYWTDWGTPAKIKKGGLNGVDIYSLVTENIQWPNGITLDLLSGRLYWVDSKLHSISSIDVNGGNRKTILEDEKRLAHPFSLAVFEDKVFWTDIINEAIFSANRLTGSDVNLLAENLLSPEDMVLFHNLTQPRGVNWCERTTLSNGGCQYLCLPAPQINPHSPKFTCACPDGMLLARDMRSCLTEAEAAVATQETSTVRLKVSSTAVRTQHTTTRPVPDTSRLPGATPGLTTVEIVTMSHQALGDVAGRGNEKKPSSVRALSIVLPIVLLVFLCLGVFLLWKNWRLKNINSINFDNPVYQKTTEDEVHICHNQDGYSYPSRQMVSLEDDVA

SEQ ID NO: 446 - protein, 136 aa, Homo sapiens
MNLQPIFWIGLISSVCCVFAQTDENRCLKANAKSCGECIQAGPNCGWCTNSTFLQEGMPTSARCDDLEALKKKGCPPDDIENPRGSKDIKKNKNVTNRSKGTAEKLKPEDITQIQPQQLVLRLRSGEPQTFTLKFK

SEQ ID NO: 447 - protein, 263 aa, Homo sapiens
MITFLPLLLGLSLGCTGAGGFVAHVESTCLLDDAGTPKDFTYCISFNKDLLTCWDPEENKMAPCEFGVLNSLANVLSQHLNQKDTLMQRLRNGLQNCATHTQPFWGSLTNRTRPPSVQVAKTTPFNTREPVMLACYVWGFYPAEVTITWRKNGKLVMPHSSAHKTAQPNGDWTYQTLSHLALTPSYGDTYTCVVEHTGAPEPILRDWTPGLSPMQTLKVSVSAVTLGLGLIIFSLGVISWRRAGHSSYTPLPGSNYSEGWHIS

SEQ ID NO: 448 - protein, 343 aa, Homo sapiens
MAGLNCGVSIALLGVLLLGAARLPRGAEAFEIALPRESNITVLIKLGTPTLLAKPCYIVISKRHITMLSIKSGERIVFTFSCQSPENHFVIEIQKNIDCMSGPCPFGEVQLQPSTSLLPTLNRTFIWDVKAHKSIGLELQFSIPRLRQIGPGESCPDGVTHSISGRIDATVVRIGTFCSNGTVSRIKMQEGVKMALHLPWFHPRNVSGFSIANRSSIKRLCIIESVFEGEGSATLMSANYPEGFPEDELMTWQFVVPAHLRASVSFLNFNLSNCERKEERVEYYIPGSTTNPEVFKLEDKQPGNMAGNFNLSLQGCDQDAQSPGILRLQFQVLVQHPQNESSE

SEQ ID NO: 449 - protein, 822 aa, Homo sapiens [sequence omitted]

SEQ ID NO: 450 - protein, 3122 aa, Homo sapiens
MPGAAGVLLLLLLSGGLGGVQAQRPQQQRQSQAHQQRGLFPAVLNLASNALITTNATCGEKGPEMYCKLVEHVPGQPVRNPQCRICNQNSSNPNQRHPITNAIDGKNTWWQSPSIKNGIEYHYVTITLDLQQVFQIAYVIVKAANSPRPGNWILERSLDDVEYKPWQYHAVTDTECLTLYNIYPRTGPPSYAKDDEVICTSFYSKIHPLENGEIHISLINGRPSADDPSPELLEFTSARYIRLRFQRIRTLNADLMMFAHKDPREIDPIVTRRYYYSVKDISVGGMCICYGHARACPLDPATNKSRCECEHNTCGDSCDQCCPGFHQKPWRAGTFLTKTECEACNCHGKAEECYYDENVARRNLSLNIRGKYIGGGVCINCTQNTAGINCETCTDGFFRPKGVSPNYPRPCQPCHCDPIGSLNEVCVKDEKHARRGLAPGSCHCKTGFGGVSCDRCARGYTGYPDCKACNCSGLGSKNEDPCFGPCICKENVEGGDCSRCKSGFFNLQEDNWKGCDECFCSGVSNRCQSSYWTYGKIQDMSGWYLTDLPGRIRVAPQQDDLDSPQQISISNAEARQALPHSYYWSAPAPYLGNKLPAVGGQLTFTISYDLEEEEEDTERVLQLMIILEGNDLSISTAQDEVYLHPSEEHTNVLLLKEESFTIHGTHFPVRRKEFMTVLANLKRVLLQITYSFGMDAIFRLSSVNLESAVSYPTDGSIAAAVEVCQCPPGYTGSSCESCWPRHRRVNGTIFGGICEPCQCFGHAESCDDVTGECLNCKDHTGGPYCDKCLPGFYGEPTKGTSEDCQPCACPLNIPSNNFSPTCHLDRSLGLICDGCPVGYTGPRCERCAEGYFGQPSVPGGSCQPCQCNDNLDFSIPGSCDSLSGSCLICKPGTTGRYCELCADGYFGDAVDAKNCQPCRCNAGGSFSEVCHSQTGQCECRANVQGQRCDKCKAGTFGLQSARGCVPCNCNSFGSKSFDCEESGQCWCQPGVTGKKCDRCAHGYFNFQEGGCTACECSHLGNNCDPKTGRCICPPNTIGEKCSKCAPNTWGHSITTGCKACNCSTVGSLDFQCNVNTGQCNCHPKFSGAKCTECSRGHWNYPRCNLCDCFLPGTDATTCDSETKKCSCSDQTGQCTCKVNVEGIHCDRCRPGKFGLDAKNPLGCSSCYCFGTTTQCSEAKGLIRTWVTLKAEQTILPLVDEALQHTTTKGIVFQHPEIVAHMDLMREDLHLEPFYWKLPEQFEGKKLMAYGGKLKYAIYFEAREETGFSTYNPQVIIRGGTPTHARIIVRHMAAPLIGQLTRHEIEMTEKEWKYYGDDPRVHRTVTREDFLDILYDIHYILIKATYGNFMRQSRISEISMEVAEQGRGTTMTPPADLIEKCDCPLGYSGLSCEACLPGFYRLRSQPGGRTPGPTLGTCVPCQCNGHSSLCDPETSICQNCQHHTAGDFCERCALGYYGIVKGLPNDCQQCACPLISSSNNFSPSCVAEGLDDYRCTACPRGYEGQYCERCAPGYTGSPGNPGGSCQECECDPYGSLPVPCDPVTGFCTCRPGATGRKCDGCKHWHAREGWECVFCGDECTGLLLGDLARLEQMVMSINLTGPLPAPYKMLYGLENMTQELKHLLSPQRAPERLIQLAEGNLNTLVTEMNELLTRATKVTADGEQTGQDAERTNTRAKSLGEFIKELARDAEAVNEKAIKLNETLGTRDEAFERNLEGLQKEIDQMIKELRRKNLETQKEIAEDELVAAEALLKKVKKLFGESRGENEEMEKDLREKLADYKNKVDDAWDLLREATDKIREANRLFAVNQKNMTALEKKKEAVESGKRQIENTLKEGNDILDEANRLADEINSIIDYVEDIQTKLPPMSEELNDKIDDLSQEIKDRKLAEKVSQAESHAAQLNDSSAVLDGILDEAKNISFNATAAFKAYSNIKDYIDEAEKVAKEAKDLAHEATKLATGPRGLLKEDAKGCLQKSFRILNEAKKLANDVKENEDHLNGLKTRIENADARNGDLLRTLNDTLGKLSAIPNDTAAKLQAVKDKARQANDTAKDVLAQITELHQNLDGLKKNYNKLADSVAKTNAVVKDPSKNKIIADADATVKNLEQEADRLIDKLKPIKELEDNLKKNISEIKELINQARKQANSIKVSVSSGGDCIRTYKPEIKKGSYNNIVVNVKTAVADNLLFYLGSAKFIDFLAIEMRKGKVSFLWDVGSGVGRVEYPDLTIDDSYWYRIVASRTGRNGTISVRALDGPKASIVPSTHHSTSPPGYTILDVDANAMLFVGGLTGKLKKADAVRVITFTGCMGETYFDNKPIGLWNFREKEGDCKGCTVSPQVEDSEGTIQFDGEGYALVSRPIRWYPNISTVMFKFRTFSSSALLMYLATRDLRDFMSVELTDGHIKVSYDLGSGMASVVSNQNHNDGKWKSFTLSRIQKQANISIVDIDTNQEENIATSSSGNNFGLDLKADDKIYFGGLPTLRNLSMKARPEVNLKKYSGCLKDIEISRTPYNILSSPDYVGVTKGCSLENVYTVSFPKPGFVELSPVPIDVGTEINLSFSTKNESGIILLGSGGTPAPPRRKRRQTGQAYYAILLNRGRLEVHLSTGARTMRKIVIRPEPNLFHDGREHSVHVERTRGIFTVQVDENRRYMQNLTVEQPIEVKKLFVGGAPPEFQPSPLRNIPPFEGCIWNLVINSVPMDFARPVSFKNADIGRCAHQKLREDEDGAAPAEIVIQPEPVPTPAFPTPTPVLTHGPCAAESEPALLIGSKQFGLSRNSHIAIAFDDTKVKNRLTIELEVRTEAESGLLFYMARINHADFATVQLRNGLPYFSYDLGSGDTHTMIPTKINDGQWHKIKIMRSKQEGILYVDGASNRTISPKKADILDVVGMLYVGGLPINYTTRRIGPVTYSIDGCVRNLHMAEAPADLEQPTSSFHVGTCFANAQRGTYFDGTGFAKAVGGFKVGLDLLVEFEFRTTTTTGVLLGISSQKMDGMGIEMIDEKLMFHVDNGAGRFTAVYDAGVPGHLCDGQWHKVTANKIKHRIELTVDGNQVEAQSPNPASTSADTNDPVFVGGFPDDLKQFGLTTSIPFRGCIRSLKLTKGTGKPLEVNFAKALELRGVQPVSCPAN

SEQ ID NO: 451 - protein, 345 aa, Homo sapiens
MPTGHLGSPLALALLPVATNRPAVQWSCTAPQPTSLAAGTIGAARRRPMASSARRARGSRRYSWVSEEPLNYVGWQDGEPQQPGGCTYVDVDGAWRTTSCDTKLQGAVCGVSSGPPPPRRISYHGSCPQGLADSAWIPFREHCYSFHMELLLGHKEARQRCQRAGGAVLSILDEMENVFVWEHLQSYEGQSRGAWLGMNFNPKGGTLVWQDNTAVNYSNWGPPGLGPSMLSHNSCYWIQSNSGLWRPGACTNITMGVVCKLPRAEQSSFSPSALPENPAALVVVLMAVLLLLALLTAALILYRRRQSIERGAFEGARYSRSSSSPTEATEKNILVSDMEMNEQQE

SEQ ID NO: 452 - protein, 977 aa, Homo sapiens
MPARRLLLLLTLLLPGLGIFGSTSTVTLPETLLFVSTLDGSLHAVSKRTGSIKWTLKEDPVLQVPTHVEEPAFLPDPNDGSLYTLGSKNNEGLTKLPFTIPELVQASPCRSSDGILYMGKKQDIWYVIDLLTGEKQQTLSSAFADSLCPSTSLLYLGRTEYTITMYDTKTRELRWNATYFDYAASLPEDDVDYKMSHFVSNGDGLVVTVDSESGDVLWIQNYASPVVAFYVWQREGLRKVMHINVAVETLRYLTFMSGEVGRITKWKYPFPKETEAKSKLTPTLYVGKYSTSLYASPSMVHEGVAVVPRGSTLPLLEGPQTDGVTIGDKGECVITPSTDVKFDPGLKSKNKLNYLRNYWLLIGHHETPLSASTKMLERFPNNLPKHRENVIPADSEKKSFEEVINLVDQTSENAPTTVSRDVEEKPAHAPARPEAPVDSMLKDMATIILSTFLLIGWVAFIITYPLSMHQQQQLQHQQFQKELEKIQLLQQQQQQLPFHPPGDTAQDGELLDTSGPYSESSGTSSPSTSPRASNHSLCSGSSASKAGSSPSLEQDDGDEETSVVIVGKISFCPKDVLGHGAEGTIVYRGMFDNRDVAVKRILPECFSFADREVQLLRESDEHPNVIRYFCTEKDRQFQYIAIELCAATLQEYVEQKDFAHLGLEPITLLQQTTSGLAHLHSLNIVHRDLKPHNILISMPNAHGKIKAMISDFGLCKKLAVGRHSFSRRSGVPGTEGWIAPEMLSEDCKENPTYTVDIFSAGCVFYYVISEGSHPFGKSLQRQANILLGACSLDCLHPEKHEDVIARELIEKMIAMDPQKRPSAKHVLKHPFFWSLEKQLQFFQDVSDRIEKESLDGPIVKQLERGGRAVVKMDWRENITVPLQTDLRKFRTYKGGSVRDLLRAMRNKKHHYRELPAEVRETLGSLPDDFVCYFTSRFPHLLAHTYRAMELCSHERLFQPYYFHEPPEPQPPVTPDAL

SEQ ID NO: 453 - protein, 536 aa, Homo sapiens
MRKLLTNLPAAAVLSAQVYSAVLQGLWEENVCGTPGRTRVCTALLYGQVCPFQDSTDGLRTITSILFNWPPENTSVYYQPPQRSSFRIKLAFRNLSWPGLGLEDHQEIVLGQLVLPEPNEAKPDDPAPRPGQHALTMPALEPAPPLLADLGPALEPESPAALGPPGYLHSAPGPAPAPGEGPPPGTVLEPQSAPESSCPCRGSVKNQPSEELPDMTTFPPRLLAEQLTLMDAELFKKVVLHECLGCIWGQGHLKGNEHMAPTVRATIAHFNRLTNCITTSCLGDHSMRARDRARVVEHWIKVARECLSLNNFSSVHVIVSALCSNPIGQLHKTWAGVSSKSMKELKELCKKDTAVKRDLLIKAGSFKVATQERNPQRVQMRLRRQKKGVVPFLGDFLTELQRLDSAIPDDLDGNTNKRSKEVRVLQEMQLLQVAAMNYRLRPLEKFVTYFTRMEQLSDKERWGFTMMSRIVSNSWPQAIHPPQPPKVLTLQLQAVLPAGARKPVGWQHPAVAGNPPGCWPEHRLCTIPHPDRRHQG

SEQ ID NO: 454 - protein, 423 aa, Homo sapiens
MVFAFWKVFLILSCLAGQVSVVQVTIPDGFVNVTVGSNVTLICIYTTTVASREQLSIQWSFFHKKEMEPISHSSCLSTEGMEEKAVSQCLKMTHARDARGRCSWTSEIYFSQGGQAVAIGQFKDRITGSNDPGNASITISHMQPADSGIYICDVNNPPDFLGQNQGILNVSVLVKPSKPLCSVQGRPETGHTISLSCLSALGTPSPVYYWHKLEGRDIVPVKENFNPTTGILVIGNLTNFEQGYYQCTAINRLGNSSCEIDLTSSHPEVGIIVGALIGSLVGAAIIISVVCFARNKAKAKAKERNSKTIAELEPMTKINPRGESEAMPREDATQLEVTLPSSIHETGPDTIQEPDYEPKPTQEPAPEPAPGSEPMAVPDLDIELELEPETQSELEPEPEPEPESEPGVVVEPLSEDEKGVVKA

SEQ ID NO: 455 - protein, 122 aa, Homo sapiens
MARSLGVLVALPFPLPVGFNAEEAHNIVKECVDGVLGGEDYNHNNINQWTASIVEQSLTHLVKLGKAYKYIVTCAVVQKSAYGFHTASSCFWDTTSDGTCTVRWENRTMNCIVNVFAIAIVL

SEQ ID NO: 456 - protein, 141 aa, Homo sapiens
MRLSVRRVLLAAGCALVLVLAVQLGQQVLECRAVLAGLRSPRGAMRPEQEELVMVGTNHVEYRYGKAMPLIFVGGVPRSGTTLMRAMLDAHPEVRCGEETRIIPRVLAMRQAWSKSGREKLRLDEAGVTDEVLDAAMQAFI

SEQ ID NO: 457 - protein, 114 aa, Homo sapiens
MKLWVSALLMAWFGVLSCVQAEFFTSIGHMTDLIYAEKELVQSLKEYILVEEAKLSKIKSWANKMEALTSKSAADAEGYLAHPVNAYKLVKRLNTDWPALEDLVLQDSAAGFIA

SEQ ID NO: 458 - protein, 979 aa, Homo sapiens
MELAALCRWGLLLALLPPGAASTQDNYLSTDVGSCTLVCPLHNQEVTAEDGTQRCEKCSKPCARVCYGLGMEHLREVRAVTSANIQEFAGCKKIFGSLAFLPESFDGDPASNTAPLQPEQLQVFETLEEITGYLYISAWPDSLPDLSVFQNLQVIRGRILHNGAYSLTLQGLGISWLGLRSLRELGSGLALIHHNTHLCFVHTVPWDQLFRNPHQALLHTANRPEDECVGEGLACHQLCARGHCWGPGPTQCVNCSQFLRGQECVEECRVLQGLPREYVNARHCLPCHPECQPQNGSVTCFGPEADQCVACAHYKDPPFCVARCPSGVKPDLSYMPIWKFPDEEGACQPCPINCTHSCVDLDDKGCPAEQRASPLTSIISAVVGILLVVVLGVVFGILIKRRQQKIRKYTMRRLLQETELVEPLTPSGAMPNQAQMRILKETELRKVKVLGSGAFGTVYKGIWIPDGENVKIPVAIKVLRENTSPKANKEILDEAYVMAGVGSPYVSRLLGICLTSTVQLVTQLMPYGCLLDHVRENRGRLGSQDLLNWCMQIAKGMSYLEDVRLVHRDLAARNVLVKSPNHVKITDFGLARLLDIDETEYHADGGKVPIKWMALESILRRRFTHQSDVWSYGVTVWELMTFGAKPYDGIPAREIPDLLEKGERLPQPPICTIDVYMIMVKCWMIDSECRPRFRELVSEFSRMARDPQRFVVIQNEDLGPASPLDSTFYRSLLEDDDMGDLVDAEEYLVPQQGFFCPDPAPGAGGMVHHRHRSSSTRSGGGDLTLGLEPSEEEAPRSPLAPSEGAGSDVFDGDLGMGAAKGLQSLPTHDPSPLQRYSEDPTVPLPSETDGYVAPLTCSPQPEYVNQPDVRPQPPSPREGPLPAARPAGATLERPKTLSPGKNGVVKDVFAFGGAVENPEYLTPQGGAAPQPHPPPAFSPAFDNLYYWDQDPPERGAPPSTFKGTPTAENPEYLGLDVPV

SEQ ID NO: 459 - protein, 91 aa, Homo sapiens
MAGIFYFALFSCLFGICDAVTGSRVYPANEVTLLDSRSVQGELGWIASPLEGGWEEVSIMDEKNTPIRTYQVCNVMEPSQNNWLRTDWITR

SEQ ID NO: 460 - protein, 1368 aa, Homo sapiens
MQGPPLLTAAHLLCVCTAALAVAPGPRFLVTAPGIIRPGGNVTIGVELLEHCPSQVTVKAELLKTASNLTVSVLEAEGVFEKGSFKTLTLPSDPKSNLIQQWLSQQSDLGVISKTFQLSSHPILGDWSIQVQVNDQTYYQSFQVSEYVLPKFEVTLQTPLYCSMNSKHLNGTITAKYTYGKPVKGDVTLTFLPLSFWGKKKNITKTFKINGSANFSFNDEEMKNVMDSSNGLSEYLDLSSPGPVEILTTVTESVTGISRNVSTNVFFKQHDYIIEFFDYTTVLKPSLNFTATVKVTRADGNQLTLEERRNNVVITVTQRNYTEYWSGSNSGNQKMEAVQKINYTVPQSGTFKIEFPILEDSSELQLKAYFLGSKSSMAVHSLFKSPSKTYIQLKTRDENIKVGSPFELVVSGNKRLKELSYMVVSRGQLVAVGKQNSTMFSLTPENSWTPKACVIVYYIEDDGEIISDVLKIPVQLVFKNKIKLYWSKVKAEPSEKVSLRISVTQPDSIVGIVAVDKSVNLMNASNDITMENVVHELELYNTGYYLGMFMNSFAVFQECGLWVLTDANLTKDYIDGVYDNAEYAERFMEENEGHIVDIHDFSLGSSPHVRKHFPETWIWLDTNMGYRIYQEFEVTVPDSITSWVATGFVISEDLGLGLTTTPVELQAFQPFFIFLNLPYSVIRGEEFALEITIFNYLKDATEVKVIIEKSDKFDILMTSNEINATGHQQTLLVPSEDGATVLFPIRPTHLGEIPITVTALSPTASDAVTQMILVKAEGIEKSYSQSILLDLTDNRLQSTLKTLSFSFPPNTVTGSERVQITAIGDVLGPSINGLASLIRMPYGCGEQNMINFAPNIYILDYLTKKKQLTDNLKEKALSFMRQGYQRELLYQREDGSFSAFGNYDPSGSTWLSAFVLRCFLEADPYIDIDQNVLHRTYTWLKGHQKSNGEFWDPGRVIHSELQGGNKSPVTLTAYIVTSLLGYRKYQPNIDVQESIHFLESEFSRGISDNYTLALITYALSSVGSPKAKEALNMLTWRAEQEGGMQFWVSSESKLSDSWQPRSLDIEVAAYALLSHFLQFQTSEGIPIMRWLSRQRNSLGGFASTQDTTVALKALSEFAALMNTERTNIQVTVTGPSSPSPVKFLIDTHNRLLLQTAELAVVQPTAVNISANGFGFAICQLNVVYNVKASGSSRRRRSIQNQEAFDLDVAVKENKDDLNHVDLNVCTSFSGPGRSGMALMEVNLLSGFMVPSEAISLSETVKKVEYDHGKLNLYLDSVNETQFCVNIPAVRNFKVSNTQDASVSIVDYYEPRRQAVRSYNSEVKLSSCDLCSDVQGCRPCEDGASGSHHHSSVIFIFCFKLLYFMELWL

SEQ ID NO: 461 - protein, 89 aa, Homo sapiens
MNLQPIFWIGLISSVCCVFAQTDENRCLKANAKSCGECIQAGPNCGWCTNSTFLQEGMPTSARCDDLEALKKKGCPPDDIENPRGSKDI

SEQ ID NO: 462 - protein, 118 aa, Homo sapiens
MQWALAVLLAFLSPASQKSSNLEGRTKSVIRQTGSSAEITCDLAEGSNGYIHWYLHQEGKAPQRLQYYDSYNSKVVLESGVSPGKYYTYASTRNNLRLILRNLIENDFGVYYCATWDG

SEQ ID NO: 463 - protein, 137 aa, Homo sapiens
MGPWSRVRVAKCQMLVTCFFILVTAAGPLCGHHGDSYLLRGPLCCHPPSVPGEEPVPGCAPMGLLCGVEPGGPPDSGSRAERCSHREGGPGPHGRGLPVLLPGVLRTGAGGVLETPQPHPAPILPSWMLTCLEEGPA

SEQ ID NO: 464 - protein, 95 aa, Homo sapiens
MPVYSAWPAEPTMAPFEPLASGILLLLWLIAPSRACTCVPPHPQTAFCNSDLVIRAKFVGTPEVNQTTLYQRYEIKMTKMYKGFQALGDAADIRF

SEQ ID NO: 465 - protein, 184 aa, Homo sapiens
MKLWVSALLMAWFGVLSCVQAEFFTSIGHMTDLIYAEKELVQSLKEYILVEEAKLSKIKSWANKMEALTSKSAADAEGYLAHPVNAYKLVKRLNTDWPALEDLVLQDSAAGFIANLSVQRQFFPTDEDEIGAAKALMRLQDTYRLDPGTISRGELPGTKYQAMLSVDDCFGMGRSAYNEGDYYH

SEQ ID NO: 466 - protein, 461 aa, Homo sapiens
MKMASFLAFLLLNFRVCLLLLQLLMPHSAQFSVLGPSGPILAMVGEDADLPCHLFPTMSAETMELKWVSSSLRQVVNVYADGKEVEDRQSAPYRGRTSILRDGITAGKAALRIHNVTASDSGKYLCYFQDGDFYEKALVELKVADGVGLYAVAASVIMRGSSGEGVSCTIRSSLLGLEKTASISIADPFFRSAQRWIAALAGTLPVLLLLLGGAGYFLWQQQEEKKTQFRKKKREQELREMAWSTMKQEQSTRVKLLEELRWRSIQYASRGERHSAYNEWKKALFKPADVILDPKTANPILLVSEDQRSVQRAKEPQDLPDNPERFNWHYCVLGCESFISGRHYWEVEVGDRKEWHIGVCSKNVQRKGWVKMTPENGFWTMGLTDGNKYRTLTEPRTNLKLPKPPKKVGVFLDYETGDISFYNAVDGSHIHTFLDVSFSEALYPVFRILTLEPTALTICPA

SEQ ID NO: 467 - protein, 136 aa, Homo sapiens
MAPFEPLASGILLLLWLIAPSRACTCVPPHPQTAFCNSDLVIRAKFVGTPEVNQTTLYQRYEIKMTKMYKGFQALGDAADIRFVYTPAMESVCGYFHRSHNRSEEFLIAGEAPSPRPVPHQPVPGARPSNHEGARL

SEQ ID NO: 468 - protein, 1130 aa, Homo sapiens
MAAAGQLCLLYLSAGLLSRLGAAFNLDTREDNVIRKYGDPGSLFGFSLAMHWQLQPEDKRLLLVGAPRAEALPLQRANRTGGLYSCDITARGPCTRIEFDNDADPTSESKEDQWMGVTVQSQGPGGKVVTCAHRYEKRQHVNTKQESRDIFGRCYVLSQNLRIEDDMDGGDWSFCDGRLRGHEKFGSCQQGVAATFTKDFHYIVFGAPGTYNWKGIVRVEQKNNTFFDMNIFEDGPYEVGGETEHDESLVPVPANSYLGLLFLTSVSYTDPDQFVYKTRPPREQPDTFPDVMMNSYLGFSLDSGKGIVSKDEITFVSGAPRANHSGAVVLLKRDMKSAHLLPEHIFDGEGLASSFGYDVAVVDLNKDGWQDIVIGAPQYFDRDGEVGGAVYVYMNQQGRWNNVKPIRLNGTKDSMFGIAVKNIGDINQDGYPDIAVGAPYDDLGKVFIYHGSANGINTKPTQVLKGISPYFGYSIAGNMDLDRNSYPDVAVGSLSDSVTIFRSRPVINIQKTITVTPNRIDLRQKTACGAPSGICLQVKSCFEYTANPAGYNPSISIVGTLEAEKERRKSGLSSRVQFRNQGSEPKYTQELTLKRQKQKVCMEETLWLQDNIRDKLRPIPITASVEIQEPSSRRRVNSLPEVLPILNSDEPKTAHIDVHFLKEGCGDDNVCNSNLKLEYKFCTREGNQDKFSYLPIQKGVPELVLKDQKDIALEITVTNSPSNPRNPTKDGDDAHEAKLIATFPDTLTYSAYRELRAFPEKQLSCVANQNGSQADCELGNPFKRNSNVTFYLVLSTTEVTFDTPDLDINLKLETTSNQDNLAPITAKAKVVIELLLSVSGVAKPSQVYFGGTVVGEQAMKSEDEVGSLIEYEFRVINLGKPLTNLGTATLNIQWPKEISNGKWLLYLVKVESKGLEKVTCEPQKEINSLNLTESHNSRKKREITEKQIDDNRKFSLFAERKYQTLNCSVNVNCVNIRCPLRGLDSKASLILRSRLWNSTFLEEYSKLNYLDILMRAFIDVTAAAENIRLPNAGTQVRVTVFPSKTVAQYSGVPWWIILVAILAGILMLALLVFILWKCGFFKRSRYDDSVPRYHAVRIRKEEREIKDEKYIDNLEKKQWITKWNENESYS

SEQ ID NO: 469 - protein, 168 aa, Homo sapiens
MVFAFWKVFLILSCLAGQVSVVQVTIPDGFVNVTVGSNVTLICIYTTTVASREQLSIQWSFFHKKEMEPISHSSCLSTEGMEEKAVSQCLKMTHARDARGRCSWTSEIYFSQGGQAVAIGQFKDRITGSNDPGNASITISHMQPADSGIYICDVNNPPDFLGQNQGIL

SEQ ID NO: 470 - protein, 256 aa, Homo sapiens
MTAPGAAGRCPPTTWLGSLLLLVCLLASRSITEEVSEYCSHMIGSGHLQSLQRLIDSQMETSCQITFEFVDQEQLKDPVCYLKKAFLLVQDIMEDTMRFRDNTPNAIAIVQLQELSLRLKSCFTKDYEEHDKACVRTFYETPLQLLEKVKNVFNETKNLLDKDWNIFSKNCNNSFAECSSQGHERQSEGSFSPQLQESVFHLLVPSVILVLLAVGGLLFYRWRRRSHQEPQRADSPLEQPEGSPLTQDDRQVELPV

SEQ ID NO: 471 - protein, 201 aa, Homo sapiens
MAAKVFESIGKFGLALAVAGGVVNSALYNVDAGHRAVIFDRFRGVQDIVVGEGTHFLIPWVQKPIIFDCRSRPRNVPVITGSKDLQNVNITLRILFRPVASQLPRIFTSIGEDYDERVLPSITTEILKSVVARFDAGELITQRELVSRQVSDDLTERAATFGLILDDVSLTHLTFGKEFTEAVEAKQVAQQEAERARFVVE

SEQ ID NO: 472 - protein, 1211 aa, Homo sapiens
MQLKIMPKKKRLSAGRVPLILFLCQMISALEVPLDPKLLEDLVQPPTITQQSPKDYIIDPRENIVIQCEAKGKPPPSFSWTRNGTHFDIDKDPLVTMKPGTGTLIINIMSEGKAETYEGVYQCTARNERGAAVSNNIVVRPSRSPLWTKEKLEPITLQSGQSLVLPCRPPIGLPPPIIFWMDNSFQRLPQSERVSQGLNGDLYFSNVLPEDTREDYICYARFNHTQTIQQKQPISVKVISVDELNDTIAANLSDTEFYGAKSSRERPPTFLTPEGNASNKEELRGNVLSLECIAEGLPTPIIYWAKEDGMLPKNRTVYKNFEKTLQIIHVSEADSGNYQCIAKNALGAIHHTISVRVKAAPYWITAPQNLVLSPGEDGTLICRANGNPKPRISWLTNGVPIEIAPDDPSRKIDGDTIIFSNVQERSSAVYQCNASNEYGYLLANAFVNVLAEPPRILTPANTLYQVIANRPALLDCAFFGSPLPTIEWFKGAKGSALHEDIYVLHENGTLEIPVAQKDSTGTYTCVARNKLGMAKNEVHLEIKDPTWIVKQPEYAVVQRGSMVSFECKVKHDHTLSLTVLWLKDNRELPSDERFTVDKDHLVVADVSDDDSGTYTCVANTTLDSVSASAVLSVVAPTPTPAPVYDVPNPPFDLELTDQLDKSVQLSWTPGDDNNSPITKFIIEYEDAMHKPGLWHHQTEVSGTQTTAQLKLSPYVNYSFRVMAVNSIGKSLPSEASEQYLTKASEPDKNPTAVEGLGSEPDNLVITWKPLNGFESNGPGLQYKVSWRQKDGDDEWTSVVVANVSKYIVSGTPTFVPYLIKVQALNDMGFAPEPAVVMGHSGEDLPMVAPGNVRVNVVNSTLAEVHWDPVPLKSIRGHLQGYRIYYWKTQSSSKRNRRHIEKKILTFQGSKTHGMLPGLEPFSHYTLNVRVVNGKGEGPASPDRVFNTPEGVPSAPSSLKIVNPTLDSLTLEWDPPSHPNGILTEYTLKYQPINSTHELGPLVDLKIPANKTRWTLKNLNFSTRYKFYFYAQTSAGSGSQITEEAVTTVDEAGILPPDVGAGKAMASRQVDIATQGWFIGLMCAVALLILILLIVCFIRRNKGGKYPVKEKEDAHADPEIQPMKEDDGTFGEYSDAEDHKPLKKGSRTPSDRTVKKEDSDDSLVDYGEGVNGQFNEDGSFIGQYSGKKEKEPAEGNESSEAPSPVNAMNSFV

SEQ ID NO: 473 - protein, 539 aa, Homo sapiens
MKPAAREARLPPRSPGLRWALPLLLLLLRLGQILCAGGTPSPIPDPSVATVATGENGITQISSTAESFHKQNGTGTPQVETNTSEDGESSGANDSLRTPEQGSNGTDGASQKTPSSTGPSPVFDIKAVSISPTNVILTWKSNDTAASEYKYVVKHKMENEKTITVVHQPWCNITGLRPATSYVFSITPGIGNETWGDPRVIKVITEPIPVSDLRVALTGVRKAALSWSNGNGTASCRVLLESIGSHEELTQDSRLQVNISGLKPGVQYNINPYLLQSNKTKGDPLGTEGGLDASNTERSRAGSPTAPVHDESLVGPVDPSSGQQSRDTEVLLVGLEPGTRYNATVYSQAANGTEGQPQAIEFRTNAIQVFDVTAVNISATSLTLIWKVSDNESSSNYTYKIHVAGETDSSNLNVSEPRAVIPGLRSSTFYNITVCPVLGDIEGTPGFLQVHTPPVPVSDFRVTVVSTTEIGLAWSSHDAESFQMHITQEGAGNSRVEITTNQSIIIGGLFPGTKYCFEIVPKGPNGTEGASRTVCNRTG

SEQ ID NO: 474 - protein, 822 aa, Homo sapiens
MVSWGRFICLVVVTMATLSLARPSFSLVEDTTLEPEEPPTKYQISQPEVYVAAPGESLEVRCLLKDAAVISWTKDGVHLGPNNRTVLIGEYLQIKGATPRDSGLYACTASRTVDSETWYFMVNVTDAISSGDDEDDTDGAEDFVSENSNNKRAPYWTNTEKMEKRLHAVPAANTVKFRCPAGGNPMPTMRWLKNGKEFKQEHRIGGYKVRNQHWSLIMESVVPSDKGNYTCVVENEYGSINHTYHLDVVERSPHRPILQAGLPANASTVVGGDVEFVCKVYSDAQPHIQWIKHVEKNGSKYGPDGLPYLKVLKHSGINSSNAEVLALFNVTEADAGEYICKVSNYIGQANQSAWLTVLPKQQAPGREKEITASPDYLEIAIYCIGVFLIACMVVTVILCRMKNTTKKPDFSSQPAVHKLTKRIPLRRQVTVSAESSSSMNSNTPLVRITTRLSSTADTPMLAGVSEYELPEDPKWEFPRDKLTLGKPLGEGCFGQVVMAEAVGIDKDKPKEAVTVAVKMLKDDATEKDLSDLVSEMEMMKMIGKHKNIINLLGACTQDGPLYVIVEYASKGNLREYLRARRPPGMEYSYDINRVPEEQMTFKDLVSCTYQLARGMEYLASQKCIHRDLAARNVLVTENNVMKIADFGLARDINNIDYYKKTTNGRLPVKWMAPEALFDRVYTHQSDVWSFGVLMWEIFTLGGSPYPGIPVEELFKLLKEGHRMDKPANCTNELYMMMRDCWHAVPSQRPTFKQLVEDLDRILTLTTNEEYLDLSQPLEQYSPSYPDTRSSCSSGDDSVFSPDPMPYEPCLPQYPHINGSVKT

SEQ ID NO: 475 - protein, 275 aa, Homo sapiens
MALQIPGGFWAAAVTVMLVMLSTPVAEARDFPKDFLVQFKGMCYFTNGTERVRGVARYIYNREEYGRFDSDVGEFQAVTELGRSIEDWNNYKDFLEQERAAVDKVCRHNYEAELRTTLQRQVEPTVTISPSRTEALNHHNLLVCSVTDFYPAQIKVRWFRNDQEETAGVVSTSLIRNGDWTFQILVMLEITPQRGDIYTCQVEHPSLQSPITVEWRAQSESAQSKMLSGIGGFVLGLIFLGLGLIIRHRGQKGPRGPPPAGNISAMIQSGERAQA

SEQ ID NO: 476 - protein, 124 aa, Homo sapiens
MAAKVFESIGKFGLALAVAGGVVNSALYNVDAGHRAVIFDRFRGVQDIVVGEGTHFLIPWVQKPIIFDCRSRPRNVPVITGSKDLQNVNITLRILFRPVASQLPRIFTSIGEDYDERVLPSITT

SEQ ID NO: 477 - protein, 144 aa, Homo sapiens
MARGSAVAWAALGPLLWGCALGLQGGMLYPQESPSRECKELDGLWSFRADFSDNRRRGFEEQWYRRPLWESGPTVDMPVPSSFNDISQDWRLRHFVGWVWYEREVILPERWTQDLRTRVVLRIGSAHSYAIVVSQGLLCPEHIF

SEQ ID NO: 478 - protein, 134 aa, Homo sapiens
MARGSAVAWAALGPLLWGCALGLQGGMLYPQESPSRECKELDGLWSFRADFSDNRRRGFEEQWYRRPLWESGPTVDMPVPSSFNDISQDWRLRHFVGWVWYEREVILPERWTQDLRTRVVLRIGSAHSYAIVGW

SEQ ID NO: 479 - protein, 145 aa, Homo sapiens
MTLLWCVVSLYFYGILQSDASERCDDWGLDTMRQIQVFEDEPARIKCPLFEHFLKFNYSTAHSAGLTLIWYWTRQDRDLEEPINFRLPENRISKEKDVLWFRPTLLNDTGNYTCMLRNTTYCSKVAFPLEVVQKDSCFNSPMKLP

SEQ ID NO: 480 - protein, 178 aa, Homo sapiens
MHSSALLCCLVLLTGVRASPGQGTQSENSCTHFPGNLPNMLRDLRDAFSRVKTFFQMKDQLDNLLLKESLLEDFKGYLGCQALSEMIQFYLEEVMPQAENQDPDIKAHVNSLGENLKTLRLRLRRCHRFLPCENKSKAVEQVKNAFNKLQEKGIYKAMSEFDIFINYIEAYMTMKIRN

SEQ ID NO: 481 - protein, 153 aa, Homo sapiens
MSPHPTALLGLVLCLAQTIHTQEEDLPRPSISAEPGTVIPLGSHVTFVCRGPVGVQTFRLERDSRSTYNDTEDVSQASPSESEARFRIDSVREGNAGLYRCIYYKPPKWSEQSDYLELLVKESSGGPDSPDTEPGSSAGPTQRPSDNSHNERE

SEQ ID NO: 482 - protein, 43 aa, Homo sapiens
MVGAMWKVIVSLVLLMPGPCDGLFRSLYRSVSMPPKGDSGQPL

SEQ ID NO: 483 - protein, 310 aa, Homo sapiens
MAPSSPRPALPALLVLLGALFPVSEAQVHLALGDQRLNPTVTYGNDSFSAKASVSVTAEDEGTQRLTCAVILGNQSQETLQTVTIYSFPAPNVILTKPEVSEGTEVTVKCEAHPRAKVTLNGVPAQPLGPRAQLLLKATPEDNGRSFSCSATLEVAGQLIHKNQTRELRVLYGPRLDERDCPGNWTWPENSQQTPMCQAWGNPLPELKCLKDGTFPLPIGESVTVTRDLEGTYLCRARSTQGEVTRKVTVNVLSPRYEIVIITVVAAAVIMGTAGLSTYLYNRQRKIKKYRLQQAQKGTPMKPNTQATPP

SEQ ID NO: 484 - protein, 52 aa, Homo sapiens
MVGAMWKVIVSLVLLMPGPCDGLFRSLYRSVSMPPKGDSGQPLFLTPYIEAG

SEQ ID NO: 485 - protein, 153 aa, Homo sapiens
MKLWVSALLMAWFGVLSCVQAEFFTSIGHMTDLIYAEKELVQSLKEYILVEEAKLSKIKSWANKMEALTSKSAADAEGYLAHPVNAYKLVKRLNTDWPALEDLVLQDSAAGFIANLSVQRQFFPTDEDEIGAAKALMRLQDTYRLDPGTISRG

SEQ ID NO: 486 - protein, 360 aa, Homo sapiens
MWEAQFLGLLFLQPLWVAPVKPLQPGAEVPVVWAQEGAPAQLPCSPTIPLQDLSLLRRAGVTWQHQPDSGPPAAAPGHPLAPGPHPAAPSSWGPRPRRYTVLSVGPGGLRSGRLPLQPRVQLDERGRQRGDFSLWLRPARRADAGEYRAAVHLRDRALSCRLRLRLGQASMTASPPGSLRASDWVILNCSFSRPDRPASVHWFRNRGQGRVPVRESPHHHLAESFLFLPQVSPMDSGPWGCILTYRDGFNVSIMYNLTVLGLEPPTPLTVYAGAGSRVGLPCRLPAGVGTRSFLTAKWTPPGGGPDLLVTGDNGDFTLRLEDVSQAQAGTYTCHIHLQEQQLNATVTLAIITGQPQVGKE

SEQ ID NO: 487 - protein, 114 aa, Homo sapiens
MAMGLFRVCLVVVTAIINHPLLFPRENATVPENEEEIIRKMQAHQEKLQLEQLRLEEEVARLAAEKEALEQVAEEGRQQNETRVAWDLWSTLCMILFLMIEVWRQDHQEGPSPE

SEQ ID NO: 488 - protein, 144 aa, Homo sapiens
MLLAWVQAFLVSNMLLAEAYGSGGCFWDNGHLYREDQTSPAPGLRCLNWLDAQSGLASAPVSGAGNHSYCRNPDEDPRGPWCYVSGEAGVPEKRPCEDLRCPGQVQLWNSLRAVPDESCFPPHLQRPPPRPCQPSRQKSRKRLK

SEQ ID NO: 489 - protein, 219 aa, Homo sapiens
MGRLVAVGLLGIALALLGERLLALRNRLKASREVESVDLPHCHLIKGIEAGSEDIDILPNGLAFFSVGLKFPGLHSFAPDKPGGILMMDLKEEKPRARELRISRGFDLASFNPHGISTFIDNDDTVYLFVVNHPEFKNTVEIFKFEEAENSLLHLKTVKHELLPSVNDITAVGPAHFYATNDHYFSDPFLKYLETYLNLHWANVVYYSPNEVKVVYLCC

SEQ ID NO: 490 - protein, 71 aa, Homo sapiens
MAWSLGSWLGGCLLVSALGMVPPPENVRMNSVNFKNILQWESPAFAKGNLTFTAQYLSHYWTPWNASRSTC

SEQ ID NO: 491 - protein, 164 aa, Homo sapiens
MVLLWLTLLLIALPCLLQTKEGGKPWAGAENLTCWIHDVDFLSCSWAVGPGAPADVQYDLYLNVANRRQQYECLHYKTDAQGTRIGCRFDDISRLSSGSQSSHILVRGRSAAFGIPCTDKFVVFSQIEILTPPNMTAKCNKTHSFMHWKMRSHFNRKFRYELQI

SEQ ID NO: 492 - protein, 321 aa, Homo sapiens
MDVRALPWLPWLLWLLCRGGGDADSRAPFTPTWPRSREREAAAFRESLNRHRYLNSLFPSENSTAFYGINQFSYLFPEEFKAIYLRSKPSKFPRYSAEVHMSIPNVSLPLRFDWRDKQVVTQVRNQQMCGGCWAFSVVGAVESAYAIKGKPLEDLSVQQVIDCSYNNYGCNGGSTLNALNWLNKMQVKLVKDSEYPFKAQNGLCHYFSGSHSGFSIKGYSAYDFSDQEDEMAKALLTFGPLVVIVDAVSWQDYLGGIIQHHCSSGEANHAVLITGFDKTGSTPYWIVRNSWGSSWGVDGYAHVKMGSNVCGIADSVSSIFV

SEQ ID NO: 493 - protein, 173 aa, Homo sapiens
MLLAWVQAFLVSNMLLAEAYGSGGCFWDNGHLYREDQTSPAPGLRCLNWLDAQSGLASAPVSGAGNHSYCRNPDEDPRGPWCYVSGEAGVPEKRPCEDLRCPETTSQALPAFTTEIQEASEGPGADEVQVFAPANALPARSEAAAVQPVIGISQRVRMNSKEKKDLGTLGGRI

SEQ ID NO: 494 - protein, 217 aa, Homo sapiens
LQIPGGFWAAAVTVMLVMLSTPVAEARDFPKDFLVQFKGMCYFTNGTERVRGVARYIYNREEYGRFDSDVGEFQAVTELGRSIEDWNNYKDFLEQERAAVDKVCRHNYEAELRTTLQRQVEPTVTISPSRTEALNHHNLLVCSVTDFYPAQIKVRWFRNDQEETAGVVSTSLIRNGDWTFQILVMLEITPQRGDIYTCQVEHPSLQSPITVEWRLLH

SEQ ID NO: 495 - protein, 683 aa, Homo sapiens
MALFVRLLALALALALGPAATLAGPAKSPYQLVLQHSRLRGRQHGPNVCAVQKVIGTNRKYFTNCKQWYQRKICGKSTVISYECCPGYEKVPGEKGCPAALPLSNLYETLGVVGSTTTQLYTDRTEKLRPEMEGPGSFTIFAPSNEAWASLPAEVLDSLVSNVNIELLNALRYHMVGRRVLTDELKHGMTLTSMYQNSNIQIHHYPNGIVTVNCARLLKADHHATNGVVHLIDKVISTITNNIQQIIEIEDTFETLRAAVAASGLNTMLEGNGQYTLLAPTNEAFEKIPSETLNRILGDPEALRDLLNNHILKSAMCAEAIVAGLSVETLEGTTLEVGCSGDMLTINGKAIISNKDILATNGVIHYIDELLIPDSAKTLFELAAESDVSTAIDLFRQAGLGNHLSGSERLTLLAPLNSVFKDGTPPIDAHTRNLLRNHIIKDQLASKYLYHGQTLETLGGKKLRVFVYRNSLCIENSCIAAHDKRGRYGTLFTMDRVLTPPMGTVMDVLKGDNRFSMLVAAIQSAGLTETLNREGVYTVFAPTNEAFRALPPRERSRLLGDAKELANILKYHIGDEILVSGGIGALVRLKSLQGDKLEVSLKNNVVSVNKEPVAEPDIMATNGVVHVITNVLQPPANRPQERGDELADSALEIFKQASAFSRASQRSVRLAPVYQKLLERMKH

SEQ ID NO: 496 - protein, 276 aa, Homo sapiens
TMGLSNILFVMAFLLSGAAPLKIQAYFNETADLPCQFANSQNQSLSELVVFWQDQENLVLNEVYLGKEKFDSVHSKYMGRTSFDSDSWTLRLHNLQIKDKGLYQCIIHHKKPTGMIRIHQMNSELSVLANFSQPEIVPISNITENVYINLTCSSIHGYPEPKKMSVLLRTKNSTIEYDGVMQKSQDNVTELYDVSISLSVSFPDVTSNMTIFCILETDKTRLLSSPFSIGTNTMEREESEQTKKREKIHIPERSDEAQRVFKSSKTSSCDKSDTCF

SEQ ID NO: 497 - protein, 124 aa, Homo sapiens
MNLQPIFWIGLISSVCCVFAQTDENRCLKANAKSCGECIQAGPNCGWCTNSTFLQEGMPTSARCDDLEALKKKGCPPDDIENPRGSKDIKKNKNVTNRSKGTAEKLKPEDITQIQPQQLVLRLR

SEQ ID NO: 498 - protein, 348 aa, Homo sapiens
MGPRARPALLLLMLLQTAVLQGRLLRSHSLHYLFMGASEQDLGLSLFEALGYVDDQLFVFYDHESRRVEPRTPWVSSRISSQMWLQLSQSLKGWDHMFTVDFWTIMENHNHSKESHTLQVILGCEMQEDNSTEGYWKYGYDGQDHLEFCPDTLDWRAAEPRAWPTKLEWERHKIRARQNRAYLERDCPAQLQQLLELGRGVLDQQVPPLVKVTHHVTSSVTTLRCRALNYYPQNITMKWLKDKQPMDAKEFEPKDVLPNGDGTYQGWITLAVPPGEEQRYTCQVEHPGLDQPLIVIWEPSPSGTLVIGVISGIAVFVVILFIGILFIILRKRQGSRGAMGHYVLAERE

SEQ ID NO: 499 - protein, 163 aa, Homo sapiens
MNLQPIFWIGLISSVCCVFAQTDENRCLKANAKSCGECIQAGPNCGWCTNSTFLQEGMPTSARCDDLEALKKKGCPPDDIENPRGSKDIKKNKNVTNRSKGTAEKLKPEDITQIQPQQLVLRLRSGEPQTFTLKFKRAEDYPIDLYYLMDLSYSMKDDLENVK

SEQ ID NO: 500 - protein, 70 aa, Homo sapiens
MKNHLLFWGVLAVFIKAVHVKAQEDERIVLVDNKCKCARITSRIIRSSEDPNEDIVERNIRIIVPLNNRE

SEQ ID NO: 501 - protein, 120 aa, Homo sapiens
MRLPAQLLGLLMLWVPGSSGDVVMTQSPLSLPVTLGQPASISCRSSQSLVYSDGNTYLNWFQQRPGQSPRRLIYKVSNRDSGVPDRFSGSGSGTDFTLKISRVEAEDVGVYYCMQGTHWP

SEQ ID NO: 502 - protein, 312 aa, Homo sapiens
MPPPRTGRGLLWLGLVLSSVCVALGSETQANSTTDALNVLLIIVDDLRPSLGCYGDKLVRSPNIDQLASHSLLFQNAFAQQAVCAPSRVSFLTGRRPDTTRLYDFNSYWRVHAGNFSTIPQYFKENGYVTMSVGKVFHPGISSNHTDDSPYSWSFPPYHPSSEKYENTKTCRGPDGELHANLLCPVDVLDVPEGTLPDKQSTEQAIQLLEKMKTSASPFFLAVGYHKPHIPFRYPKEFQKLYPLENITLAPDPEVPDGLPPVAYNPWMDIRQREDVQALNISVPYGPIPVDFQEDQSSTGFRLKTSSTRKYK

SEQ ID NO: 503 - protein, 712 aa, Homo sapiens
MGSGARFPSGTLRVRWLLLLGLVGPVLGAARPGFQQTSHLSSYEIITPWRLTRERREAPRPYSKQVSYVIQAEGKEHIIHLERNKDLLPEDFVVYTYNKEGTLITDHPNIQNHCHYRGYVEGVHNSSIALSDCFGLRGLLHLENASYGIEPLQNSSHFEHIIYRMDDVYKEPLKCGVSNKDIEKETAKDEEEEPPSMTQLLRRRRAVLPQTRYVELFIVVDKERYDMMGRNQTAVREEMILLANYLDSMYIMLNIRIVLVGLEIWTNGNLINIVGGAGDVLGNFVQWREKFLITRRRHDSAQLVLKKGFGGTAGMAFVGTVCSRSHAGGINVFGQITVETFASIVAHELGHNLGMNHDDGRDCSCGAKSCIMNSGASGSRNFSSCSAEDFEKLTLNKGGNCLLNIPKPDEAYSAPSCGNKLVDAGEECDCGTPKECELDPCCEGSTCKLKSFAECAYGDCCKDCRFLPGGTLCRGKTSECDVPEYCNGSSQFCQPDVFIQNGYPCQNNKAYCYNGMCQYYDAQCQVIFGSKAKAAPKDCFIEVNSKGDRFGNCGFSGNEYKKCATGNALCGKLQCENVQEIPVFGIVPAIIQTPSRGTKCWGVDFQLGSDVPDPGMVNEGTKCGAGKICRNFQCVDASVLNYDCDVQKKCHGHGVCNSNKNCHCENGWAPPNCETKGYGGSVDSGPTYNGQMAKIKQTLLDSRGVFLDMFLQ

SEQ ID NO: 504 - protein, 348 aa, Homo sapiens
MSLVLLSLAALCRSAVPREPTVQCGSETGPSPEWMLQHDLIPGDLRDLRVEPVTTSVATGDYSILMNVSWVLRADASIRLLKATKICVTGKSNFQSYSCVRCNYTEAFQTQTRPSGGKWTFSYIGFPVELNTVYFIGAHNIPNANMNEDGPSMSVNFTSPGSLWDPNITACKKNEETVEVNFTTTPLGNRYMALIQHSTIIGFSQVFEPHQKKQTRASVVIPVTGDSEGATVQLTPYFPTCGSDCIRHKGTVVLCPQTGVPFPLDNNKSKPGGWLPLLLLSLLVATWVLVAGIYLMWRHERIKKTSFSTTTLLPPIKVLVVYPSEICFHHTICYFTEFLQNHCRSEVI

SEQ ID NO: 505 - protein, 116 aa, Homo sapiens
METPAQLLFLLLLWLPDTTGEIVLTQSPGTLSLSPGERATLSCRASQSVSSSYLAWYQQKPGQAPRLLIYGASSRATGIPDRFSGSGSGTDFTLTISRLEPEDFAVYYCQQYGSSP

SEQ ID NO: 506 - protein, 152 aa, Homo sapiens
MNLQPIFWIGLISSVCCVFAQTDENRCLKANAKSCGECIQAGPNCGWCTNSVSKTFLQEGMPTSARCDDLEALKKKGCPPDDIENPRGSKDIKKNKNVTNRSKGTAEKLKPEDITQIQPQQLVLRLRSGEPQTFTLKFKRAEDYPIDLYYLM

SEQ ID NO: 507 - protein, 628 aa, Homo sapiens
MGSGARFPSGTLRVRWLLLLGLVGPVLGAARPGFQQTSHLSSYEIITPWRLTRERREAPRPYSKQVSYVIQAEGKEHIIHLERNKDLLPEDFVVYTYNKEGTLITDHPNIQNHCHYRGYVEGVHNSSIALSDCFGLRGLLHLENASYGIEPLQNSSHFEHIIYRMDDVYKEPLKCGVSNKDIEKETAKDEEEEPPSMTQLLRRRRAVLPQTRYVELFIVVDKERYDMMGRNQTAVREEMILLANYLDSMYIMLNIRIVLVGLEIWTNGNLINIVGGAGDVLGNFVQWREKFLITRRRHDSAQLVLKKGFGGTAGMAFVGTVCSRSHAGGINVFGQITVETFASIVAHELGHNLGMNHDDGRDCSCGAKSCIMNSGASGSRNFSSCSAEDFEKLTLNKGGNCLLNIPKPDEAYSAPSCGNKLVDAGEECDCGTPKECELDPCCEGSTCKLKSFAECAYGDCCKDCRFLPGGTLCRGKTSECDVPEYCNGSSQFCQPDVFIQNGYPCQNNKAYCYNGMCQYYDAQCQVIFGSKAKAAPKDCFIEVNSKGDRFGNCGFSGNEYKKCATGNALCGKLQCENVQEIPVFGIVPAIIQTPSRGTKCWGVDFQLGSDVPDPGMVNEGTKCGAGKK

SEQ ID NO: 508 - protein, 321 aa, Homo sapiens
MAPAFLLLLLLWPQGCVSGPSADSVYTKVRLLEGETLSVQCSYKGYKNRVEGKVWCKIRKKKCEPGFARVWVKGPRYLLQDDAQAKVVNITMVALKLQDSGRYWCMRNTSGILYPLMGFQLDVSPAPQTERNIPFTHLDNILKSGTVTTGQAPTSGPDAPFTTGVMVFTPGLITLPRLLASTRPASKTGYSFTATSTTSQGPRRTMGSQTVTASPSNARDSSAGPESISTKSGDLSTRSPTTGLCLTSRSLLNRLPSMPSIRHQDVYSTVLGVVLTLLVLMLIMVYGFWKKRHMASYSMCSDPSTRDPPGRPEPYVEVYLI

SEQ ID NO: 509 - protein, 117 aa, Homo sapiens
MDMRVPAQLLGLLLLWLPDTRCDIQMTQSPSSLSASVGDRVTITCRASQGISNYLAWYQQKPGKVPKLLIYAASTLQSGVPSRFSGSGSGTDFTLTISSLQPEDVATYYCQKYNSAP

SEQ ID NO: 510 - protein, 269 aa, Homo sapiens
MSPHPTALLGLVLCLAQTIHTQEDLPRPSISAEPGTVIPLGSHVTFVCRGPVGVQTFRLERDSRSTYNDTEDVSQASPSESEARFRIDSVREGNAGLYRCIYYKPPKWSEQSDYLELLVKGPTQRPSDNSHNEHAPASQGLKAEHLYILIGVSVVFLFCLLLLVLFCLHRQNQIKQGPPRSKDEEQKPQQRPDLAVDVLERTADKATVNGLPEKDRETDTSALAAGSSQEVTYAQLDHWALTQRTARAVSPQSTKPMAESITYAAVARH

SEQ ID NO: 511 - protein, 1323 aa, Homo sapiens
MSFLEEARAAGRAVVLALVLLLLPAVPVGASVPPRPLLPLQPGMPHVCAEQELTLVGRRQPCVQALSHTVPVWKAGCGWQAWCVGHERRTVYYMGYRQVYTTEARTVLRCCRGWMQQPDEEGCLSDVGECANANGGCAGRCRDTVGGFYCRWPPPSHQLQGDGETCQDVDECRTHNGGCQHRCVNTPGSYLCECKPGFRLHTDSRTCLAINSCALGNGGCQHHCVQLTITRHRCQCRPGFQLQEDGRHCVRRSPCANRNGSCMHRCQVVRGLARCECHVGYQLAADGKACEDVDECAAGLAQCAHGCLNTQGSFKCVCHAGYELGADGRQCYRIEMEIVNSCEANNGGCSHGCSHTSAGPLCTCPRGYELDTDQRTCIDVDDCADSPCCQQVCTNNPGGYECGCYAGYRLSADGCGCEDVDECASSRGGCEHHCTNLAGSFQCSCEAGYRLHEDRRGCSPLEEPMVDLDGELPFVRPLPHIAVLQDELPQLFQDDDVGADEEEAELRGEHTLTEKFVCLDDSFGHDCSLTCDDCRNGGTCLLGLDGCDCPEGWTGLICNETCPPDTFGKNCSFSCSCQNGGTCDSVTGACRCPPGVSGTNCEDGCPKGYYGKHCRKKCNCANRGRCHRLYGACLCDPGLYGRFCHLTCPPWAFGPGCSEECQCVQPHTQSCDKRDGSCSCKAGFRGERCQAECELGYFGPGCWQACTCPVGVACDSVSGECGKRCPAGFQGEDCGQECPVGTFGVNCSSSCSCGGAPCHGVTGQCRCPPGRTGEDCEADCPEGRWGLGCQEICPACQHAARCDPETGACLCLPGFVGSRCQDVCPAGWYGPSCQTRCSCANDGHCHPATGHCSCAPGWTGFSCQRACDTGHWGPDCSHPCNCSAGHGSCDAISGLCLCEAGYVGPRCEQQCPQGHFGPGCEQRCQCQHGAACDHVSGACTCPAGWRGTFCEHACPAGFFGLDCRSACNCTAGAACDAVNGSCLCPAGRRGPRCAETCPAHTYGHNCSQACACFNGASCDPVHGQCHCAPGWMGPSCLQACPAGLYGDNCRHSCLCQNGGTCDPVSGHCACPEGWAGLACEKECLPRDVRAGCRHSGGCLNGGLCDPHTGRCLCPAGWTGDKCQSPCAKGTFGPHCEGRCACRWGGPCHLATGACLCPPGWRGAPGVRMPACGAGLERPVPSAAAARLALPATTSLGPAAVPLASLAPAASRPAHPAALGRTVRRCASVPVRTRPATLPPGPAHVLLATTAPAASNDVRPGGMGQAVNSCVGVSTGAPVMRPRGPAAAPLGSSGRTATSPVRRAASAPTAPTCVGVGRGRPATL

SEQ ID NO: 512 - protein, 167 aa, Homo sapiens
MGLSNILFVMAFLLSGAAPLKIQAYFNETADLPCQFANSQNQSLSELVVFWQDQENLVLNEVYLGKEKFDSVHSKYMGRTSFDSDSWTLRLHNLQIKDKGLYQCIIHHKKPTGMIRIHQMNSELSVLANFSQPEIVPISNITENVYINLTCSSIHGYPEPKKMSVLL

SEQ ID NO: 513 - protein, 100 aa, Homo sapiens
MSSGTELLWPGAALLVLLGVAASLCVRCSRPGAKRREDQQSFTGSRTYSLVGQAWPGPLADMAPTRKDKLLQFYPSLEDPASSRYQNFSKGSRHGSEEAY

SEQ ID NO: 514 - protein, 778 aa, Homo sapiens
MIATWMLFSLFTKPPQLSEDDIWLKSEGDNYSATLLEPAASSLSPDHKNMEIEVSVAECKSVPGITSTPHPMDHPSAFYSPPHNGLLTDHHESLDNDVAREIRYLDEVLEANCCDSAVDGTYNGTSSPEPGAVVLVGGLSPPVHEATQPEPTERTASRQAPPHIELSNSSPDPMAEAERTNGHSPSQPRDALGDSLQVPVSPSSTTSSRCSSRDGEFTLTTLKKEAKFELRAFHEDKKPSKLFEDDEHEKEQYCIRKVRPSEEMLELEKERRELIRSQAVKKNPGIAAKWWNPPQEKTIEEQLDEEHLESHKKYKERKERRAQQEQLLLQKQLQQQQQQPPSQLCTAPASSHERASMIDKAKEDIVTEQIDFSAARKQFQLMENSRQAVAKGQSTPRLFSIKPFYRPLGSVNSDKPLTNPRPPSVGGPPEDSGASAAKGQKSPGALETPSAAGSQGNTASQGKEGPYSEPSKRGPLSKLWAEDGEFTSARAVLTVVKDDDHGILDQFSRSVNVSLTQEELDSGLDELSVRSQDTTVLETLSNDFSMDNISDSGASNETTNALQENSLADFSLPQTPQTDNPSEGRGEGVSKSFSDHGFYSPSSTLGDSPLVDDPLEYQAGLLVQNAIQQAIAEQVDKAVSKTSRDGAEQQGPEATVEEAEAAAFGSEKPQSMFEPPQVSSPVQEKRDVLPKILPAEDRALRERGPPQPLPAVQPSGPINMEETRPEGSYFSKYSEAAELRSTASLLATQESDVMVGPFKLRSRKQRTLSMIEEEIRAA

SEQ ID NO: 515 - protein, 819 aa, Homo sapiens
MGSGARFPSGTLRVRWLLLLGLVGPVLGAARPGFQQTSHLSSYEIITPWRLTRERREAPRPYSKQVSYVIQAEGKEHIIHLERNKDLLPEDFVVYTYNKEGTLITDHPNIQNHCHYRGYVEGVHNSSIALSDCFGLRGLLHLENASYGIEPLQNSSHFEHIIYRMDDVYKEPLKCGVSNKDIEKETAKDEEEEPPSMTQLLRRRRAVLPQTRYVELFIVVDKERYDMMGRNQTAVREEMILLANYLDSMYIMLNIRIVLVGLEIWTNGNLINIVGGAGDVLGNFVQWREKFLITRRRHDSAQLVLKKGFGGTAGMAFVGTVCSRSHAGGINVFGQITVETFASIVAHELGHNLGMNHDDGRDCSCGAKSCIMNSGASGSRNFSSCSAEDFEKLTLNKGGNCLLNIPKPDEAYSAPSCGNKLVDAGEECDCGTPKECELDPCCEGSTCKLKSFAECAYGDCCKDCRFLPGGTLCRGKTSECDVPEYCNGSSQFCQPDVFIQNGYPCQNNKAYCYNGMCQYYDAQCQVIFGSKAKAAPKDCFIEVNSKGDRFGNCGFSGNEYKKCATGNALCGKLQCENVQEIPVFGIVPAIIQTPSRGTKCWGVDFQLGSDVPDPGMVNEGTKCGAGKICRNFQCVDASVLNYDCDVQKKCHGHGVCNSNKNCHCENGWAPPNCETKGYGGSVDSGPTYNEMNTALRDGLLVFFFLIVPLIVCAIFIFIKRDQLWRSYFRKKRSQTYESDGKNQANPSRQPGSVPRHVSPVTPPREVPIYANRFAVPTYAAKQPQQFPSRPPPPQPKVSSQGNLIPARPAPAPPLYSSLT

SEQ ID NO: 516 - protein, 117 aa, Homo sapiens
MDMRVPAQLLGLLLLWLPGARCDIQLTQSPSFLSASVGDRVTITCRASQGISSYLAWYQQKPGKAPKLLIYAASTLQSGVPSRFSGSGSGTEFTLTISSLQPEDFATYYCQQLNSYP

SEQ ID NO: 517 - protein, 345 aa, Homo sapiens
MGPRARPALLLLMLLQTAVLQGRLLRSHSLHYLFMGASEQDLGLSLFEALGYVDDQLFVFYDHESRRVEPRTPWVSSRISSQMWLQLSQSLKGWDHMFTVDFWTIMENHNHSKESHTLQVILGCEMQEDNSTEGYWKYGYDGQDHLEFCPDTLDWRAAEPRAWPTKLEWERHKIRARQNRAYLERDCPAQLQQLLELGRGVLDQQEGSESSSLPGKVTTLRCRALNYYPQNITMKWLKDKQPMDAKEFEPKDVLPNGDGTYQGWITLAVPPGEEQRYTCQVEHPGLDQPLIVIWEPSPSGTLVIGVISGIAVFVVILFIGILFIILRKRQGSRGAMGHYVLAERE

SEQ ID NO: 518 - protein, 352 aa, Homo sapiens
MKMASFLAFLLLNFRVCLLLLQLLMPHSAQFSVLGPSGPILAMVGEDADLPCHLFPTMSAETMELKWVSSSLRQVVNVYADGKEVEDRQSAPYRGRTSILRDGITAGKAALRIHNVTASDSGKYLCYFQDGDFYEKALVELKVAALGSDLHVDVKGYKDGGIHLECRSTGWYPQPQIQWSNNKGENIPTVEAPVVADGVGLYAVAASVIMRGSSGEGVSCTIRSSLLGLEKTASISIADPFFRSAQRWIAALAGTLPVLLLLLGGAGYFLWQQQEEKKTQFRKKKREQELREMAWSTMKQEQSTRVKLLEELRWRSIQYASRGERHSAYNEWKKALFKPGEEMLQMRLHFVK

SEQ ID NO: 519 - protein, 217 aa, Homo sapiens
MDPQCTMGLSNILFVMAFLLSANFSQPEIVPISNITENVYINLTCSSIHGYPEPKKMSVLLRTKNSTIEYDGVMQKSQDNVTELYDVSISLSVSFPDVTSNMTIFCILETDKTRLLSSPFSIELEDPQPPPDHIPWITAVLPTVIICVMVFCLILWKWKKKKRPRNSYKCGTNTMEREESEQTKKREKIHIPERSDEAQRVFKSSKTSSCDKSDTCF

SEQ ID NO: 520 - protein, 117 aa, Homo sapiens
MDMRVPAQLLGLLLLWLPGARCAIQMTQSPSSLSASVGDRVTITCRASQGIRNDLGWYQQKPGKAPKLLIYAASSLQSGVPSRFSGSGSGTDFTLTISSLQPEDFATYYCLQDYNYP

SEQ ID NO: 521 - protein, 117 aa, Homo sapiens
MDMRVPAQLLGLLLLWLPGAKCDIQMTQSPSTLSASVGDRVTITCRASQSISSWLAWYQQKPGKAPKLLIYKASSLESGVPSRFSGSGSGTEFTLTISSLQPDDFATYYCQQYNSYS

SEQ ID NO: 522 - protein, 246 aa, Homo sapiens
MGPRARPALLLLMLLQTAVLQGRLLQSHTLQVILGCEMQEDNSTEGYWKYGYDGQDHLEFCPDTLDWRAAEPRAWPTKLEWERHKIRARQNRAYLERDCPAQLQQLLELGRGVLDQQVTTLRCRALNYYPQNITMKWLKDKQPMDAKEFEPKDVLPNGDGTYQGWITLAVPPGEEQRYTCQVEHPGLDQPLIVIWEPSPSGTLVIGVISGIAVFVVILFIGILFIILRKRQGSRGAMGHYVLAERE

SEQ ID NO: 523 - protein, 245 aa, Homo sapiens
MAFLGLFSLLVLQSMATGATFPEEAIADLSVNMYNRLRATGEDENILFSPLSIALAMGMMELGAQGSTQKEIRHSMGYDSLKNGEEFSFLKEFSNMVTAKESQYVMKIANSLFVQNGFHVNEEFLQMMKKYFNAAVNHVDFSQNVAVANYINKWVENNTNNLVKDLVSPRDFDAATYLALINAVYFKGNWKSQFRPENTRTFSFTKDDESEVQIPMMYQQGEFYYGEFSDGSNEAGGIYQVLEIP

SEQ ID NO: 524 - protein, 334 aa, Homo sapiens
MGPRARPALLLLMLLQTAVLQGRLLRSHSLHYLFMGASEQDLGLSLFEALGYVDDQLFVFYDHESRRVEPRTPWVSSRISSQMWLQLSQSLKGWDHMFTVDFWTIMENHNHSKESHTLQVILGCEMQEDNSTEGYWKYGYDGQDHLEFCPDTLDWRAAEPRAWPTKLEWERHKIRARQNRAYLERDCPAQLQQLLELGRGVLDQQVTTLRCRALNYYPQNITMKWLKDKQPMDAKEFEPKDVLPNGDGTYQGWITLAVPPGEEQRYTCQVEHPGLDQPLIVIWEPSPSGTLVIGVISGIAVFVVILFIGILFIILRKRQGSRGAMGHYVLAERE

SEQ ID NO: 525 - protein, 381 aa, Homo sapiens
MWRSLGLALALCLLPSGGTESQDQSSLCKQPPAWSIRDQDPMLNSNGSVTVVALLQASUYLCILQASKLEDLRVKLKKEGYSNISYIVVNHQGISSRLKYTHLKNKVSEHIPVYQQEENQTDVWTLLNGSKDDFLIYDRCGRLVYHLGLPFSFLTFPYVEEAIKIAYCEKKCGNCSLTTLKDEDFCKRVSLATVDKTVETPSPHYHHEHHHNHGHQHLGSSELSENQQPGAPNAPTHPAPPGLHHHHKHKGQHRQGHPENRDMPASEDLQDLQKKLCRKRCINQLLCKLPTDSELAPRSUCCHCRHLIFEKTGSAITUQCKENLPSLCSUQGLRAEENITESCQURLPPAAUQISQQLIPTEASASURUKNQAKKUEUPSN

SEQ ID NO: 526 - protein, 1817 aa, Homo sapiens
MRTGWATPRRPAGLLMLLFWFFDLAEPSGRAANDPFTIVHGNTGKCIKPVYGWIVADDCDETEDKLWKWVSQHRLFHLHSQKCLGLDITKSVNELRMFSCDSSAMLWWKCEHHSLYGAARYRLALKDGHGTAISNASDVWKKGGSEESLCDQPYHEIYTRDGNSYGRPCEFPFLIDGTWHHDCILDEDHSGPWCATTLNYEYDRKWGICLKPENGCEDNWEKNEQFGSCYQFNTQTALSWKEAYVSCQNQGADLLSINSAAELTYLKEKEGIAKIFWIGLNQLYSARGWEWSDHKPLNFLNWDPDRPSAPTIGGSSCARMDAESGLWQSFSCEAQLPYVCRKPLNNTVELTDVWTYSDTRCDAGWLPNNGFCYLLVNESNSWDKAHAKCKAFSSDLISIHSLADVEVVVTKLHNEDIKEEVWIGLKNINIPTLFQWSDGTEVTLTYWDENEPNVPYNKTPNCVSYLGELGQWKVQSCEEKLKYVCKRKGEKLNDASSDKMCPPDEGWKRHGETCYKIYEDEVPFGTNCNLTITSRFEQEYLNDLMKKYDKSLRKYFWTGLRDVDSCGEYNWATVGGRRRAVTFSNWNFLEPASPGGCVAMSTGKSVGKWEVKDCRSFKALSICKKMSGPLGPEEASPKPDDPCPEGWQSFPASLSCYKVFHAERIVRKRNWEEAERFCQALGAHLSSFSHVDEIKEFLHFLTDQFSGQHWLWIGLNKRSPDLQGSWQWSDRTPVSTIIMPNEFQQDYDIRDCAAVKVFHRPWRRGWHFYDDREFIYLRPFACDTKLEWVCQIPKGRTPKTPDWYNPDRAGIHGPPLIIEGSEYWFVADLHLNYEEAVLYCASNHSFLATITSFVGLKAIKNKIANISGDGQKWWIRISEWPIDDHFTYSRYPWHRFPVTFGEECLYMSAKTWLIDLGKPTDCSTKLPFICEKYNVSSLEKYSPDSAAKVQCSEQWIPFQNKCFLKIKPVSLTFSQASDTCHSYGGTLPSVLSQIEQDFITSLLPDMEATLWIGLRWTAYEKINKWTDNRELTYSNFHPLLVSGRLRIPENFFEEESRYHCALILNLQKSPFTGTWNFTSCSERHFVSLCQKYSEVKSRQTLQNASETVKYLNNLYKIIPKTLTWHSAKRECLKSNMQLVSITDPYQQAFLSVQALLHNSSLWIGLFSQDDELNFGWSDGKRLHFSRWAETNGQLEDCVVLDTDGFWKTVDCNDNQPGAICYYSGNETEKEVKPVDSVKCPSPVLNTPWIPFQNCCYNFIITKNRHMATTQDEVHTKCQKLNPKSHILSIRDEKENNFVLEQLLYFNYMASWVMLGITYRNKSLMWFDKTPLSYTHWRAGRPTIKNEKFLAGLSTDGFWDIQTFKVIEEAVYFHQHSILACKIEMVDYKEEYNTTLPQFMPYEDGIYSVIQKKVTWYEALNMCSQSGGHLASVHNQNGQLFLEDIVKRDGFPLWVGLSSHDGSESSFEWSDGSTFDYIPWKGQTSPGNCVLLDPKGTWKHEKCNSVKDGAICYKPTKSKKLSRLTYSSRCPAAKENGSRWIQYKGHCYKSDQALHSFSEAKKLCSKHDHSATIVSIKDEDENKFVSRLMRENNNITMRVWLGLSQHSVDCPSSTWIQFQDSCYIFLQEAIKVESIEDVRNQCTDHGADMISIHNEEENAFILDTLKKQWKGPDDILLGMFYDTDDASFKWFDNSNMTFDKWTDQDDDEDLVDTCAFLHIKTGEWKKGNCEVSSVEGTLCKTAIPYKRKYLSDNHILISALVIASTVILTVLGAIIWFLYKKHSDSRFTTVFSTAPQSPYNEDCVLVVGEENEYPVQFD

SEQ ID NO: 527 - protein, 261 aa, Homo sapiens
MTILGTTFGMVFSLLQVVSGESGYAQNGDLEDAELDDYSFSCYSQLEVNGSQHSLTCAFEDPDVNITNLEFEICGALVEVKCLNFRKLQEIYFIETKKFLLIGKSNICVKVGEKSLTCKKIDLTTIVKPEAPFDLSVVYREGANDFVVTFNTSHLQKKYVKVLMHDVAYRQEKDENKWTHVNLSSTKLTLLQRKLQPAAMYEIKVRSIPDHYFKGFWSEWSPSYYFRTPEINNSSGLSLSYGPVSPIIRRLWNIFVRNQEK

SEQ ID NO: 528 - protein, 168 aa, Homo sapiens
MLLRSKPALPPPLMLLLLGPLGPLSPGALPRPAQAQDVVDLDFFTQEPLHLVSPSFLSVTIDANLATDPRFLILLGSPKLRTLARGLSPAYLRFGGTKTDFLIFDPKKESTFEERSYWQSQVNQDICKYGSIPPDVEEKLRLEWPYQEQLLLREHYQKKFKNSTYSTS

SEQ ID NO: 529 - protein, 55 aa, Homo sapiens
MRVLLAALGLLFLGALRAFPQGCSRHSSAHRGLLTAGSSVSLTTTWMRPTAVQPA

SEQ ID NO: 530 - protein, 942 aa, Homo sapiens
MGPERTGAAPLPLLLVLALSQGILNCCLAYNVGLPEAKIFSGPSSEQFGYAVQQFINPKGNWLLVGSPWSGFPENRMGDVYKCPVDLSTATCEKLNLQTSTSIPNVTEMKTNMSLGLILTRNMGTGGFLTCGPLWAQQCGNQYYTTGVCSDISPDFQLSASFSPATQPCPSLIDVVVVCDESNSIYPWDAVKNFLEKFVQGLDIGPTKTQVGLIQYANNPRVVFNLNTYKTKEEMIVATSQTSQYGGDLTNTFGAIQYARKYAYSAASGGRRSATKVMVVVTDGESHDGSMLKAVIDQCNHDNILRFGIAVLGYLNRNALDTKNLIKEIKAIASIPTERYFFNVSDEAALLEKAGTLGEQIFSIEGTVQGGDNFQMEMSQVGFSADYSSQNDILMLGAVGAFGWSGTIVQKTSHGHLIFPKQAFDQILQDRNHSSYLGYSVAAISTGESTHFVAGAPRANYTGQIVLYSVNENGNITVIQAHRGDQIGSYFGSVLCSVDVDKDTITDVLLVGAPMYMSDLKKEEGRVYLFTIKEGILGQHQFLEGPEGIENTRFGSAIAALSDINMDGFNDVIVGSPLENQNSGAVYIYNGHQGTIRTKYSQKILGSDGAFRSHLQYFGRSLDGYGDLNGDSITDVSIGAFGQVVQLWSQSIADVAIEASFTPEKITLVNKNAQIILKLCFSAKFRPTKQNNQVAIVYNITLDADGFSSRVTSRGLFKENNERCLQKNMVVNQAQSCPEHIIYIQEPSDVVNSLDLRVDISLENPGTSPALEAYSETAKVFSIPFHKDCGEDGLCISDLVLDVRQIPAAQEQPFIVSNQNKRLTFSVTLKNKRESAYNTGIVVDFSENLFFASFSLPVDGTEVTCQVAASQKSVACDVGYPALKREQQVTFTINFDFNLQNLQNQASLSFQALSESQEENKADNLVNLKIPLLYDAEIHLTR

SEQ ID NO: 531 - protein, 202 aa, Homo sapiens
MAAKVFESIGKFGLALAVAGGVVNSALYNVDAGHRAVIFDRFRGVQDIVVGEGTHFLIPWVQKPIIFDCRSRPRNVPVITGSKDLQNVNITLRILFRPVASQLPRIFTSIGEDYDERVLPSITTEILKSVVARFDAGELITQRELVSRQVSDDLTERAATFGLILDDVSLTHLTFGKEFTEAVEAKQVAQQEAERARFVVEK

SEQ ID NO: 532 - protein, 61 aa, Homo sapiens
MENPSPAAALGKALCALLLATLGAAGQPLGGESICSARALAKYSITFTGKWSQTAFPKQYP

SEQ ID NO: 533 - protein, 958 aa, Homo sapiens
MGQLCWLPLLAPLLLLRPPGVQSAGPIRAFVVPHSHMDVGWVYTVQESMRAYAANVYTSVVEELARGQQRRFIAVEQEFFRLWWDGVASDQQKYQVRQLLEEGRLEFVIGGQVMHDEAVTHLDDQILQLTEGHGFLYETFGIRPQFSWHVDPFGASATTPTLFALAGFNAHLGSRIDYDLKAAMQEARGLQFVWRGSPSLSERQEIFTHIMDQYSYCTPSHIPFSNRSGFYWNGVAVFPKPPQDGVYPNMSEPVTPANINLYAELGVSVQYATLGDYFRALHALNVTWRVRDHHDFLPYSTEPFQAWTGFYTSRSSLKGLARRASALLYAGESMFTRYLWPAPRGHLDPTWALQQLQQLRWAVSEVQHHDAITGTESPKVRDMYATHLASGMLGMRKLMASIVLDELQPQAPMAASSDAGPAGHFASVYNPLAWTVTTIVTLTVGFPGVRVTDEAGHPVPSQIQNSTETPSAYDLLILTTIPGLSYRHYNIRPTAGAQEGTQEPAATVASTLQFGRRLRRRTSHAGRYLVPVANDCYIVLLDQDTNLMHSIWERQSNRTVRVTQEFLEYHVNGDVKQGPISDNYLFTPGKAAVPAWEAVEMEIVAGQLVTEIRQYFYRNMTAQNYTYAIRSRLTHVPQGHDGELLCHRIEQEYQAGPLELNREAVLRTSTNLNSQQVIYSDNNGYQMQRRPYVSYVNNSIARNYYPMVQSAFMEDGKSRLVLLSERAHGISSQGNGQVEVMLHRRLWNNFDWDLGYNLTLNDTSVVHPVLWLLLGSWSLTTALRQRSALALQHRPVVLFGDLAGTAPKLPGPQQQEAVTLPPNLHLQILSIPGWRYSSNHTEHSQNLRKGHRGEAQADLRRVLLRLYHLYEVGEDPVLSQPVTVNLEAVLQALGSVVAVEERSLTGTWDLSMLHRWSWRTGPGRHRGDTTSPSRPPGGPIITVHPKEIRTFFIHFQQQ

SEQ ID NO: 534 - protein, 170 aa, Homo sapiens
MLAVGCALLAALLAAPGAALAPRRCPAQEVARGVLTSLPGDSVTLTCPGVEPEDNATVHWVLRKPAAGSHPSRWAGMGRRLLLRSVQLHDSGNYSCYRAGRPAGTVHLLVDVPPEEPQLSCFRKSPLSNVVCEWGPRSTPSLTTKAVLLSEQSGRRLPGAVPVFPGVPEV

SEQ ID NO: 535 - protein, 351 aa, Homo sapiens
MRQTLPCIYFWGGLLPFGMLCASSTTKCTVSHEVADCSHLKLTQVPDDLPTNITVLNLTHNQLRRLPAANFTRYSQLTSLDVGFNTISKLEPELCQKLPMLKVLNLQHNELSQLSDKTFAFCTNLTELHLMSNSIQKIKNNPFVKQKNLITLDLSHNGLSSTKLGTQVQLENLQELLLSNNKIQALKSEELDIFANSSLKKLELSSNQIKEFSPGCFHAIGRLFGLFLNNVQLGPSLTEKLCLELANTSIRNLSLSNSQLSTTSNTTFLGLKWTNLTMLDLSYNNLNVWLKCLEHLNMEDNDIPGIKSNMFTGLINLKYLSLSNSFTSLRTLTNETFVSLAHSPLHILNLT

SEQ ID NO: 536 - protein, 1873 aa, Homo sapiens
MRTGWATPRRPAGLLMLLFWFFDLAEPSGRAANDPFTIVHGNTGKCIKPVYGWIVADDCDETEDKLWKWVSQHRLFHLHSQKCLGLDITKSVNELRMFSCDSSAMLWWKCEHHSLYGAARYRLALKDGHGTAISNASDVWKKGGSEESLCDQPYHEIYTRDGNSYGRPCEFPFLIDGTWHHDCILDEDHSGPWCATTLNYEYDRKWGICLKPENGCEDNWEKNEQFGSCYQFNTQTALSWKEAYVSCQNQGADLLSINSAAELTYLKEKEGIAKIFWIGLNQLYSARGWEWSDHKPLNFLNWDPDRPSAPTIGGSSCARMDAESGLWQSFSCEAQLPYVCRKPLNNTVELTDVWTYSDTRCDAGWLPNNGFCYLLVNESNSWDKAHAKCKAFSSDLISIHSLADVEVVVTKLHNEDIKEEVWIGLKNINIPTLFQWSDGTEVTLTYWDENEPNVPYNKTPNCVSYLGELGQWKVQSCEEKLKYVCKRKGEKLNDASSDKMCPPDEGWKRHGETCYKIYEDEVPFGTNCNLTITSRFEQEYLNDLMKKYDKSLRKYFWTGLRDVDSCGEYNWATVGGRRRAVTFSNWNFLEPASPGGCVAMSTGKSVGKWEVKDCRSFKALSICKKMSGPLGPEEASPKPDDPCPEGWQSFPASLSCYKVFHAERIVRKRNWEEAERFCQALGAHLSSFSHVDEIKEFLHFLTDQFSGQHWLWIGLNKRSPDLQGSWQWSDRTPVSTIIMPNEFQQDYDIRDCAAVKVFHRPWRRGWHFYDDREFIYLRPFACDTKLEWVCQIPKGRTPKTPDWYNPDRAGIHGPPLIIEGSEYWFVADLHLNYEEAVLYCASNHSFLATITSFVGLKAIKNKIANISGDGQKWWIRISEWPIDDHFTYSRYPWHRFPVTFGEECLYMSAKTWLIDLGKPTDCSTKLPFICEKYNVSSLEKYSPDSAAKVQCSEQWIPFQNKCFLKIKPVSLTFSQASDTCHSYGGTLPSVLSQIEQDFITSLLPDMEATLWIGLRWTAYEKINKWTDNRELTYSNFHPLLVSGRLRIPENFFEEESRYHCALILNLQKSPFTGTWNFTSCSERHFVSLCQKYSEVKSRQTLQNASETVKYLNNLYKIIPKTLTWHSAKRECLKSNMQLVSITDPYQQAFLSVQALLHNSSLWIGLFSQDDELNFGWSDGKRLHFSRWAETNGQLEDCVVLDTDGFWKTVDCNDNQPGAICYYSGNETEKEVKPVDSVKCPSPVLNTPWIPFQNCCYNFIITKNRHMATTQDEVHTKCQKLNPKSHILSIRDEKENNFVLEQLLYFNYMASWVMLGITYRNKSLMWFDKTPLSYTHWRAGRPTIKNEKFLAGLSTDGFWDIQTFKVIEEAVYFHQHSILACKIEMVDYKEEYNTTLPQFMPYEDGIYSVIQKKVTWYEALNMCSQSGGHLASVHNQNGQLFLEDIVKRDGFPLWVGLSSHDGSESSFEWSDGSTFDYIPWKGQTSPGNCVLLDPKGTWKHEKCNSVKDGAICYKPTKSKKLSRLTYSSRCPAAKENGSRWIQYKGHCYKSDQALHSFSEAKKLCSKHDHSATIVSIKDEDENKFVSRLMRENNNITMRVWLGLSQHSVDQSWSWLDGSEVTFVKWENKSKSGVGRCSMLIASNETWKKVECEHGFGRVVCKVPLDCPSSTWIQFQDSCYIFLQEAIKVESIEDVRNQCTDHGADMISIHNEEENAFILDTLKKQWKGPDDILLGMFYDTDDASFKWFDNSNMTFDKWTDQDDDEDLVDTCAFLHIKTGEWKKGNCEVSSVEGTLCKTAIPYKRKYLSDNHILISALVIASTVILTVLGAIIWFLYKKHSDSRFTTVFSTAPQSPYNEDCVLVVGEENEYPVQFD

SEQ ID NO: 537 - protein, 395 aa, Homo sapiens
MLLLWVSVVAALALAVLAPGAGEQRRRAAKAPNVVLVVSDSFDGRLTFHPGSQVVKLPFINFMKTRGTSFLNAYTNSPICCPSRAAMWSGLFTHLTESWNNFKGLDPNYTTWMDVMERHGYRTQKFGKLDYTSGHHSISNRVEAWTRDVAFLLRQEGRPMVNLIRNRTKVRVMERDWQNTDKAVNWLRKEAINYTEPFVIYLGLNLPHPYPSPSSGENFGSSTFHTSLYWLEKVSHDAIKIPKWSPLSEMHPVDYYSSYTKNCTGRFTKKEIKNIRAFYYAMCAETDAMLGEIILALHQLDLLQKTIVIYSSDHGELAMEHRQFYKMSMYEASAHVPLLMMGPGIKAGLQVSNVVSLVDIYPTMLDEKTEVEISKLLAEVHMASGILLEFLCLRT

SEQ ID NO: 538 - protein, 119 aa, Homo sapiens
MALSVLRLALLLLAVTFAGSARSGPGERGPPEKSGFGSQTGGGPCPAPGGLGDASLIPQFGLFSKYRTPNCSQYRLPGCPRHFNPVCGSDMSTYANECTLCMKIREGGHNIKIIRNGPC

SEQ ID NO: 539 - protein, 77 aa, Homo sapiens
MAGNSILLAAVSILSACQQSYFALQVGKARLKYKVTPPAVTGSPEFERVFRAHFCYLSGSGVHIWPSPILLGIFRSC

SEQ ID NO: 540 - protein, 815 aa, Homo sapiens
MGPERTGAAPLPLLLVLALSQGILNCCLAYNVGLPEAKIFSGPSSEQFGYAVQQFINPKGNWLLVGSPWSGFPENRMGDVYKCPVDLSTATCEKLNLQTSTSIPNVTEMKTNMSLGLILTRNMGTGGFLTCGPLWAQQCGNQYYTTGVCSDISPDFQLSASFSPATQPCPSLIDVVVVCDESNSIYPWDAVKNFLEKFVQGLDIGPTKTQVGLIQYANNPRVVFNLNTYKTKEEMIVATSQTSQYGGDLTNTFGAIQYARKYAYSAASGGRRSATKVMVVVTDGESHDGSMLKAVIDQCNHDNILRFGIAVLGYLNRNALDTKNLIKEIKAIASIPTERYFFNVSDEAALLEKAGTLGEQIFSIEGTVQGGDNFQMEMSQVGFSADYSSQNDILMLGAVGAFGWSGTIVQKTSHGHLIFPKQAFDQILQDRNHSSYLGYSVAAISTGESTHFVAGAPRANYTGQIVLYSVNENGNITVIQAHRGDQIGSYFGSVLCSVDVDKDTITDVLLVGAPMYMSDLKKEEGRVYLFTIKEGILGQHQFLEGPEGIENTRFGSAIAALSDINMDGFNDVIVGSPLENQNSGAVYIYNGHQGTIRTKYSQKILGSDGAFRSHLQYFGRSLDGYGDLNGDSITDVSIGAFGQVVQLWSQSIADVAIEASFTPEKITLVNKNAQIILKLCFSAKFRPTKQNNQVAIVYNITLDADGFSSRVTSRGLFKENNERCLQKNMVVNQAQSCPEHIIYIQEPSDVVNSLDLRVDISLENPGTSPALEAYSETAKVFSIPFHKDCGEDGLCISDLVLDVRQIPAAQLMGQK

SEQ ID NO: 541 - protein, 108 aa, Homo sapiens
MENPSPAAALGKALCALLLATLGAAGQPLGGESICSARALAKYSITFTGKWSQTAFPKQYPLFRPPAQWSSLLGAAHSSDYSMWRKNQYVSNGLRDFAERGEAWALMK

SEQ ID NO: 542 - protein, 641 aa, Homo sapiens
MGPERTGAAPLPLLLVLALSQGILNCCLAYNVGLPEAKIFSGPSSEQFGYAVQQFINPKGNWLLVGSPWSGFPENRMGDVYKCPVDLSTATCEKLNLQTSTSIPNVTEMKTNMSLGLILTRNMGTGGFLTCGPLWAQQCGNQYYTTGVCSDISPDFQLSASFSPATQPCPSLIDVVVVCDESNSIYPWDAVKNFLEKFVQGLDIGPTKTQVGLIQYANNPRVVFNLNTYKTKEEMIVATSQTSQYGGDLTNTFGAIQYARKYAYSAASGGRRSATKVMVVVTDGESHDGSMLKAVIDQCNHDNILRFGIAVLGYLNRNALDTKNLIKEIKAIASIPTERYFFNVSDEAALLEKAGTLGEQIFSIEGTVQGGDNFQMEMSQVGFSADYSSQNDILMLGAVGAFGWSGTIVQKTSHGHLIFPKQAFDQILQDRNHSSYLGYSVAAISTGESTHFVAGAPRANYTGQIVLYSVNENGNITVIQAHRGDQIGSYFGSVLCSVDVDKDTITDVLLVGAPMYMSDLKKEEGRVYLFTIKEGILGQHQFLEGPEGIENTRFGSAIAALSDINMDGFNDVIVGSPLENQNSGAVYIYNGHQGTIRTKYSQLLCTIISCQTCSFRKSWDPMEPLGAISSTLGGPWMAMEI

SEQ ID NO: 543 - protein, 155 aa, Homo sapiens
MAAKVFESIGKFGLALAVAGGVVNSALYNVDAGHRAVIFDRFRGVQDIVVGEGTHFLIPWVQKPIIFDCRSRPRNVPVITGSKDLQNVNITLRILFRPVASQLPRIFTSIGEDYDERVLPSITTEILKSVVARFDAGELITYLPAGQSVLLQLPQ

SEQ ID NO: 544 - protein, 150 aa, Homo sapiens
MTILGTTFGMVFSLLQVVSGESGYAQNGDLEDAELDDYSFSCYSQLEVNGSQHSLTCAFEDPDVNITNLEFEICGALVEVKCLNFRKLQEIYFIETKKFLLIGKSNICVKVGEKSLTCKKIDLTTIGKKLYIKVWLSLLGYLKTLCLDIL

SEQ ID NO: 545 - protein, 52 aa, Homo sapiens
MTILGTTFGMVFSLLQVVSGESGYAQNGDLEDAELDDYSFSCYSQLEVNGSQ

SEQ ID NO: 546 - protein, 64 aa, Homo sapiens
MENPSPAAALGKALCALLLATLGAAGQPLGGESICSARALAKYSITFTGKWSQTAFPKQYPLFR

SEQ ID NO: 547 - protein, 134 aa, Homo sapiens
MALSVLRLALLLLAVTFAGSARSGPGERGPPEKSGFGSQTGGGPCPAPGGLGDGTRAPVTGGSPEDLPASLIPQFGLFSKYRTPNCSQYRLPGCPRHFNPVCGSDMSTYANECTLCMKIREGGHNIKIIRNGPC

SEQ ID NO: 548 - protein, 157 aa, Homo sapiens
MKNHLLFWGVLAVFIKAVHVKGSRDSSASASRVAGITAQEDERIVLVDNKCKCARITSRIIRSSEDPNEDIVERNIRIIVPLNNRENISDPTSPLRTRFVYHLSDLCKKCDPTEVELDNQIVTATQSNICDEDSATETCYTYDRNKCYTAVVPLVYG

SEQ ID NO: 549 - protein, 1306 aa, Homo sapiens
MQRGAALCLRLWLCLGLLDGLVSGYSMTPPTLNITEESHVIDTGDSLSISCRGQHPLEWAWPGAQEAPATGDKDSEDTGVVRDCEGTDARPYCKVLLLHEVHANDTGSYVCYYKYIKARIEGTTAASSYVFVRDFEQPFINKPDTLLVNRKDAMWVPCLVSIPGLNVTLRSQSSVLWPDGQEVVWDDRRGMLVSTPLLHDALYLQCETTWGDQDFLSNPFLVHITGNELYDIQLLPRKSLELLVGEKLVLNCTVWAEFNSGVTFDWDYPGKQAERGKWVPERRSQQTHTELSSILTIHNVSQHDLGSYVCKANNGIQRFRESTEVIVHENPFISVEWLKGPILEATAGDELVKLPVKLAAYPPPEFQWYKDGKALSGRHSPHALVLKEVTEASTGTYTLALWNSAAGLRRNISLELVVNVPPQIHEKEASSPSIYSRHSRQALTCTAYGVPLPLSIQWHWRPWTPCKMFAQRSLRRRQQQDLMPQCRDWRAVTTQDAVNPIESLDTWTEFVEGKNKTVSKLVIQNANVSAMYKCVVSNKVGQDERLIYFYVTTIPDGFTIESKPSEELLEGQPVLLSCQADSYKYEHLRWYRLNLSTLHDAHGNPLLLDCKNVHLFATPLAASLEEVAPGARHATLSLSIPRVAPEHEGHYVCEVQDRRSHDKHCHKKYLSVQALEAPRLTQNLTDLLVNVSDSLEMQCLVAGAHAPSIVWYKDERLLEEKSGVDLADSNQKLSIQRVREEDAGRYLCSVCNAKGCVNSSASVAVEGSEDKGSMEIVILVGTGVIAVFFWVLLLLIFCNMRRPAHADIKTGYLSIIMDPGEVPLEEQCEYLSYDASQWEFPRERLHLGRVLGYGAFGKVVEASAFGIHKGSSCDTVAVKMLKEGATASEHRALMSELKILIHIGNHLNVVNLLGACTKPQGPLMVIVEFCKYGNLSNFLRAKRDAFSPCAEKSPEQRGRFRAMVELARLDRRRPGSSDRVLFARFSKTEGGARRASPDQEAEDLWLSPLTMEDLVCYSFQVARGMEFLASRKCIHRDLAARNILLSESDVVKICDFGLARDIYKDPDYVRKGSARLPLKWMAPESIFDKVYTTQSDVWSFGVLLWEIFSLGASPYPGVQINEEFCQRLRDGTRMRAPELATPAIRRIMLNCWSGDPKARPAFSELVEILGDLLQGRGLQEEEEVCMAPRSSQSSEEGSFSQVSTMALHIAQADAEDSPPSLQRHSLAARYYNWVSFPGCLARGAETRGSSRMKTFEEFPMTPTTYKGSVDNQTDSGMVLASEEFEQIESRHRQESGFRGTRRTRGA

SEQ ID NO: 550 - protein, 952 aa, Homo sapiens
QLCWLPLLAPLLLLRPPGVQSAGPIRAFVVPHSHMDVGWVYTVQESMRAYAANVYTSVVEELARGQQRRFIAVEQEFFRLWWDGVASDQQKYQVRQLLEEGRLEFVIGGQVMHDEAVTHLDDQILQLTEGHGFLYETFGIRPQFSWHVDPFGASATTPTLFALAGFNAHLGSRIDYDLKAAMQEARGLQFVWRGSPSLSERQEIFTHIMDQYSYCTPSHIPFSNRSGFYWNGVAVFPKPPQDGVYPNMSEPVTPANINLYAEALVANVKQRAAWFRTPHVLWPWGCDKQFFNASVQFANMDPLLDHINSHAAELGVSVQYATLGDYFRALHALNVTWRVRDHHDFLPYSTEPFQAWTGFYTSRSSLKGLARRASALLYAGESMFTRYLWPAPRGHLDPTWALQQLQQLRWAVSEVQHHDAITGTESPKVRDMYATHLASGMLGMRKLMASIVLDELQPQAPMAASSDAGPAGHFASVYNPLAWTVTTIVTLTVGFPGVRVTDEAGHPVPSQIQNSTETPSAYDLLILTTIPGLSYRHYNIRPTAGAQEGTQEPAATVASTLQFGRRLRRRTSHAGRYLVPVANDCYIVLLDQDTNLMHSIWERQSNRTVRVTQEFLEYHVNGDVKQGPISDNYLFTPGKAAVPAWEAVEMEIVAGQLVTEIRQYFYRNMTAQNYTYAIRSRLTHVPQGHDGELLCHRIEQEYQAGPLELNREAVLRTSTNLNSQQVIYSDNNGYQMQRRPYVSYVNNSIARNYYPMVQSAFMEDGKSRLVLLSERAHGISSQGNGQVEVMLHRRLWNNFDWDLGYNLTLNDTSVVHPVLWLLLGSWSLTTALRQRSALALQHRPVVLFGDLAGTAPKLPGPQQQEAVTLPPNLHLQILSIPGWRYSSNHTEHSQNLRKGHRGEAQADLRRVLLRLYHLYEVGEDPVLSQPVTVNLEVNFPTPIQTISQGSKP

SEQ ID NO: 551 - protein, 59 aa, Homo sapiens
MTILGTTFGMVFSLLQVVSGESGYAQNGDLEDAELDDYSFSCYSQLEVNGSQHSLTCAF

SEQ ID NO: 552 - protein, 216 aa, Homo sapiens
MAAKVFESIGKFGLALAVAGGVVNSALYNVDAGHRAVIFDRFRGVQDIVVGEGTHFLIPWVQKPIIFDCRSRPRNVPVITGSKDLQNVNITLRILFRPVASQLPRIFTSIGEDYDERVLPSITTEILKSVVARFDAGELITQRELVSRQVSDDLTERAATFGLILDDVSLTHLTFGKEFTEAVEAKQVAQQEAERARFVVEKAEQQKKAAIISAEG

SEQ ID NO: 553 - protein, 175 aa, Homo sapiens
MGPERTGAAPLPLLLVLALSQGILNCCLAYNVGLPEAKIFSGPSSEQFGYAVQQFINPKGNWLLVGSPWSGFPENRMGDVYKCPVDLSTATCEKLNLQTSTSIPNVTEMKTNMSLGLILTRNMGTGGFLTCGPLWAQQCGNQYYTTGVCSDISPDFQLSASFSPATQRGVNSVCQ

SEQ ID NO: 554 - protein, 157 aa, Homo sapiens
MKNHLLFWGVLAVFIKAVHVKENGIHSEFRAQEDERIVLVDNKCKCARITSRIIRSSEDPNEDIVERNIRIIVPLNNRENISDPTSPLRTRFVYHLSDLCKKCDPTEVELDNQIVTATQSNICDEDSATETCYTYDRNKCYTAVVPLVYGGETKMVE

SEQ ID NO: 555 - protein, 180 aa, Homo sapiens
MTILGTTFGMVFSLLQVVSGESGYAQNGDLEDAELDDYSFSCYSQLEVNGSQHSLTCAFEDPDVNITNLEFEICGALVEVKCLNFRKLQEIYFIETKKFLLIGKSNICVKVGEKSLTCKKIDLTTIVKPEAPFDLSVVYREGANDFVVTFNTSHLQKKYVKVLMHDVAYRQEKDENKWTD

SEQ ID NO: 556 - protein, 71 aa, Homo sapiens
MLGLRPPLLALVGLLSLGCGRPRAPTHQPASSLSPLSGVHEVQGQQLPGMHRVGARLHLVPEAELHRAGGS

SEQ ID NO: 557 - protein, 82 aa, Homo sapiens
MMKTLLLFVGLLLTWESGQVLGDQTVSDNELQEMSNQGSKYVNKEIQNAVNGVKQIKTLIEKTNEERKTLLSNLEEAKKKKE

SEQ ID NO: 558 - protein, 272 aa, Homo sapiens
MPGGAGAARLCLLAFALQPLRPRAAREPGWTRGSEEGSPKLQHELIIPQWKTSESPVREKHPLKAELRVMAEGRELILDLEKNEQLFAPSYTETHYTSSGNPQTTTRKLEDHCFYHGTVRETELSSVTLSTCRGIRGLITVSSNLSYVIEPLPDSKGQHLIYRSEHLKPPPGNCGFEHSKPTTRDWALQFTQQTKKRPRRMKREDLNSMKYVELYLVADYLEFQKNRRDQDATKHKLIEIANYVDKVRPVLPILEHPDCSRGLGSVDPREHV

SEQ ID NO: 559 - protein, 93 aa, Homo sapiens
MLGLRPPLLALVGLLSLGCVLSQECTKFKVSSCRECIESGPGCTWCQKLGAALGPPAHATAASSPRRRSRVAPVCPRTEQGGQAPELHRAGGS

SEQ ID NO: 560 - protein, 166 aa, Homo sapiens
MLGLRPPLLALVGLLSLGCVLSQECTKFKVSSCRECIESGPGCTWCQKLNFTGPGDPDSIRCDTRPQLLMRGCAADDIMDPTSLAETQEDHNGGQKQLSPQKVTLYLRPGQAAAFNVTFRRAKGYPIDLYYLMDLSYSMLDDLRNVKKLGGDLLRALNEITESGRI

SEQ ID NO: 561 - protein, 955 aa, Homo sapiens
MPGGAGAARLCLLAFALQPLRPRAAREPGWTRGSEEGSPKLQHELIIPQWKTSESPVREKHPLKAELRVMAEGRELILDLEKNEQLFAPSYTETHYTSSGNPQTTTRKLEDHCFYHGTVRETELSSVTLSTCRGIRGLITVSSNLSYVIEPLPDSKGQHLIYRSEHLKPPPGNCGFEHSKPTTRDWALQFTQQTKKRPRRMKREDLNSMKYVELYLVADYLEFQKNRRDQDATKHKLIEIANYVDKFYRSLNIRIALVGLEVWTHGNMCEVSENPYSTLWSFLSWRRKLLAQKYHDNAQLITGMSFHGTTIGLAPLMAMCSVYQSGGVNMDHSENAIGVAATMAHEMGHNFGMTHDSADCCSASAADGGCIMAAATGHPFPKVFNGCNRRELDRYLQSGGGMCLSNMPDTRMLYGGRRCGNGYLEDGEECDCGEEEECNNPCCNASNCTLRPGAECAHGSCCHQCKLLAPGTLCREQARQCDLPEFCTGKSPHCPTNFYQMDGTPCEGGQAYCYNGMCLTYQEQCQQLWGPGARPAPDLCFEKVNVAGDTFGNCGKDMNGEHRKCNMRDAKCGKIQCQSSEARPLESNAVPIDTTIIMNGRQIQCRGTHVYRGPEEEGDMLDPGLVMTGTKCGYNHICFEGQCRNTSFFETEGCGKKCNGHGVCNNNQNCHCLPGWAPPFCNTPGHGGSIDSGPMPPESVGPVVAGVLVAILVLAVLMLMYYCCRQNNKLGQLKPSALPSKLRQQFSCPFRVSQNSGTGHANPTFKLQTPQGKRKVINTPEILRKPSQPPPRPPPDYLRGGSPPAPLPAHLSRAARNSPGPGSQIERTESSRRPPPSRPIPPAPNCIVSQDFSRPRPPQKALPANPVPGRRSLPRPGGASPLRPPGAGPQQSRPLAALAPKVSPREALKVKAGTRGLQGGRCRVEKTKQFMLLVVWTELPEQKPRAKHSCFLVPA

SEQ ID NO: 562 - protein, 129 aa, Homo sapiens
MMKTLLLFVGLLLTWESGQVLGDQTVSDNELQEMSNQGSKYVNKEIQNAVNGVKQIKTLIEKTNEERKTLLSNLEEAKKKKEDALNETRESETKLKELPGVCNETMMALWEECKPCLKQTCMKFYARVC

SEQ ID NO: 563 - protein, 70 aa, Homo sapiens
MLGLRPPLLALVGLLSLGCVLSQECTKFKVSSCRECIESGPGCTWCQKLNFTGPGDPDSIRCDTRPQLLM

SEQ ID NO: 564 - protein, 160 aa, Homo sapiens
MLGLRPPLLALVGLLSLGCVLSQECTKFKVSSCRECIESGPGCTWCQKLNFTGPGDPDSIRCDTRPQLLMRGCAADDIMDPTSLAETQEDHNGGQKQLSPQKVTLYLRPGQAAAFNVTFRRAKGYPIDLYYLMDLSYSMLDDLRNVKKLGGDLLRALNEI

SEQ ID NO: 565 - protein, 204 aa, Homo sapiens
MMKTLLLFVGLLLTWESGQVLGDQTVSDNELQEMSNQGSKYVNKEIQNAVNGVKQIKTLIEKTNEERKTLLSNLEEAKKKKEDALNETRESETKLKELPGVCNETMMALWEECKPCLKQTCMKFYARVCRSGSGLVGRQLEEFLNQSSPFYFWMNGDRIDSLLENDRQQTHMLDVMQDHFSRASSIIDELFQDRFFTREPQDTY

SEQ ID NO: 566 - protein, 419 aa, Homo sapiens
MSCAGRAGPARLAALALLTCSLWPARADNASQEYYTALINVTVQEPGRGAPLTFRIDRGRYGLDSPKAEVRGQVLAPLPLHGVADHLGCDPQTRFFVPPNIKQWIALLQRGNCTFKEKISRAAFHNAVAVVIYNNKSKEEPVTMTHPGTGDIIAVMITELRGKDILSYLEKNISVQMTIAVGTRMPPKNFSRGSLVFVSISFIVLMIISSAWLIFYFIQKIRYTNARDRNQRRLGDAAKKAISKLTTRTVKKGDKETDPDFDHCAVCIESYKQNDVVRILPCKHVFHKSCVDPWLSEHCTCPMCKLNILKALGIVPNLPCTDNVAFDMERLTRTQAVNRRSALGDLAGDNSLGLEPLRTSGISPLPQDGELTPRTGEINIAVTSGHFFHRNSLSPRSLVYESEFSTIEPSLDMYDENKT

SEQ ID NO: 567 - protein, 49 aa, Homo sapiens
MLGLRPPLLALVGLLSLGCVLSQECTKFKVSSCRECIESGPGCTWCQKL

SEQ ID NO: 568 - protein, 86 aa, Homo sapiens
MPPPRTGRGLLWLGLVLSSVCVALGSETQANSTTDALNVLLIIVDDLRPSLGCYGDKLVRSPNIDQLASHSLLFQNAFAQQAVCAP

SEQ ID NO: 569 - protein, 135 aa, Homo sapiens
MMKTLLLFVGLLLTWESGQVLGDQTVSDNELQEMSNQGSKYVNKEIQNAVNGVKQIKTLIEKTNEERKTLLSNLEEAKKKKEDALNETRESETKLKELPGVCNETMMALWEECKPCLKQTCMKFYARVCRSGSGL

SEQ ID NO: 570 - protein, 419 aa, Homo sapiens
MSCAGRAGPARLAALALLTCSLWPARADNASQEYYTALINVTVQEPGRGAPLTFRIDRGRYGLDSPKAEVRGQVLAPLPLHGVADHLGCDPQTRFFVPPNIKQWIALLQRGNCTFKEKISRAAFHNAVAVVIYNNKSKEEPVTMTHPGTGDIIAVMITELRGKDILSYLEKNISVQMTIAVGTRMPPKNFSRGSLVFVSISFIVLMIISSAWLIFYFIQKIRYTNARDRNQRRLGDAAKKAISKLTTRTVKKGDKETDPDFDHCAVCIESYKQNDVVRILPCKHVFHKSCVDPWLSEHCTCPMCKLNILKALGIVPNLPCTDNVAFDMERLTRTQAVNRRSALGDLAGDNSLGLEPLRTSGISPLPQDGELTPRTGEINIAVTKEWFIIASFGLLSALTLCYMIIRATASLNANEVEWF

SEQ ID NO: 571 - protein, 85 aa, Homo sapiens
MGITLIWCLALVLIKWITSKRRGAISYDSSDQTALYIRMLGDVRVRSRAGFESERRGSHPYIDFRIFHSQSEIEVSVSARNIRRL

SEQ ID NO: 572 - protein, 130 aa, Homo sapiens
MLPFLFFSTLFSSIFTEAQKQYWVCNSSDASISYTYCGRDLKQLYFNLYITVNTMNLPKRKEVICRGSDDDYSFCRALKGETVNTTISFSFKGIKFSKGKYKCVVEAISGSPEEMLFCLEFVILHQPNSN

SEQ ID NO: 573 - protein, 273 aa, Homo sapiens
MFSHLPFDCVLLLLLLLLTRSSEVEYRAEVGQNAYLPCFYTPAAPGNLVPVCWGKGACPVFECGNVVLRTDERDVNYWTSRYWLNGDFRKGDVSLTIENVTLADSGIYCCRIQIPGIMNDEKFNLKLVIKPAETQTLGSLPDINLTQISTLANELRDSRLANDLRDSGATIRIGIYIGAGICAGLALALIFGALIFKWYSHSKEKIQNLSLISLANLPPSGLANAVAEGIRSEENIYTIEENVYEVEEPNEYYCYVSSRQQPSQPLGCRFAMP

SEQ ID NO: 574 - protein, 139 aa, Homo sapiens
MMKTLLLFVGLLLTWESGQVLGDQTVSDNELQEMSNQGSKYVNKEIQNAVNGVKQIKTLIEKTNEERKTLLSNLEEAKKKKEDALNETRESETKLKELPGVCNETMMALWEECKPCLKQTCMKFYARVCRSGSGLVGRQ

SEQ ID NO: 575 - protein, 271 aa, Homo sapiens
MMKTLLLFVGLLLTWESGQVLGDQTVSDNELQEMSNQGSKYVNKEIQNAVNGVKQIKTLIEKTNEERKTLLSNLEEAKKKKEDALNETRESETKLKELPGVCNETMMALWEECKPCLKQTCMKFYARVCRSGSGLVGRQLEEFLNQSSPFYFWMNGDRIDSLLENDRQQTHMLDVMQDHFSRASSIIDELFQDSLMPFSPYEPLNFHAMFQPFLEMIHEAQQAMDIHFHSPAFQHPPTEFIREGDDDRTVCREIRHNSTGCLRMKDQCDKC

SEQ ID NO: 576 - protein, 33 aa, Homo sapiens
MRWRTILLQYCFLLITCLLTALEAVPIDIDKTK

SEQ ID NO: 577 - protein, 143 aa, Homo sapiens
MNLQPIFWIGLISSVCCVFAQTDENRCLKANAKSCGECIQAGPNCGWCTNSTFLQEGMPTSARCDDLEALKKKGCPPDDIENPRGSKDIKKNKNVTNRSKGTAEKLKPEDITQIQPQQLVLRLRSGEPQTFTLKFKRAEDYPI

SEQ ID NO: 578 - protein, 34 aa, Homo sapiens
MRWRTILLQYCFLLITCLLTALEAVPIDIDKTKV

SEQ ID NO: 579 - protein, 182 aa, Homo sapiens
MEQGKGLAVLILAIILLQGTLAQSIKGNHLVKVYDYQEDGSVLLTCDAEAKNITWFKDGKMIGFLTEDKKKWNLGSNAKDPRGMYQCKGSQNKSKPLQVYYRMCQNCIELNAATISGFLFAEIVSIFVLAVGVYFIAGQDGVRQSRASDKQTLLPNDQLYQPLKDREDDQYSHLQGNQLRRN

SEQ ID NO: 580 - protein, 28 aa, Homo sapiens
LAILLTFFHPFLVYRECRTWKESPSAIA

SEQ ID NO: 581 - protein, 132 aa, Homo sapiens
MQRLGATLLCLLLAAAVPTAPAPAPTATSAPVKPGPALSYPQEEATLNEMFREVEELMEDTQHKLRSAVEEMEAEEAAAKASSEVNLANLPPSYHNETNTDTKVGNNTIHVHREIHKECIIDEDCGPSMYCQ

SEQ ID NO: 582 - protein, 353 aa, Homo sapiens
MRNAVCIFYLVLRALDTLEDDMTISVEKKVPLLHNFHSFLYQPDWRFMESKEKDRQVLEDFPTISLEFRNLAEKYQTVIADICRRMGIGMAEFLDKHVTSEQEWDKYCHYVAGLVGIGLSRLFSASEFEDPLVGEDTERANSMGLFLQKTNIIRDYLEDQQGGREFWPQEVWSRYVKKLGDFAKPENIDLAVQCLNELITNALHHIPDVITYLSRLRNQSVFNFCAIPQVMAIATLAACYNNQQVFKGAVKIRKGQAVTLMMDATNMPAVKAIIYQYMEEIYHRIPDSDPSSSKTRQIISTIRTQNLPNCQLISRSHYSPIYLSFVMLLAALSWQYLTTLSQVTEDYVQTGEH

SEQ ID NO: 583 - protein, 35 aa, Homo sapiens
MQPILLLLAFLLLPRADAAGEKGQADQSCAAPQAT

SEQ ID NO: 584 - protein, 329 aa, Homo sapiens
MLGQVVTLILLLLLKVYQGKGCQGSADHVVSISGVPLQLQPNSIQTKVDSIAWKKLLPSQNGFHHILKWENGSLPSNTSNDRFSFIVKNLSLLIKAAQQQDSGLYCLEVTSISGKVQTATFQVFVFDKVEKPRLQGQGKILDRGRCQVALSCLVSRDGNVSYAWYRGSKLIQTAGNLTYLDEEVDINGTHTYTCNVSNPVSWESHTLNLTQDCQNAHQEFRFWPFLVIIVILSALFLGTLACFCVWRRKRKEKQSETSPKEFLTIYEDVKDLKTRRNHEQEQTFPGGGSTIYSMIQSQSSAPTSQEPAYTLYSLIQPSRKGDRFYSFSG

SEQ ID NO: 585 - protein, 120 aa, Homo sapiens
MKPAAREARLPPRSPGLRWALPLLLLLLRLGQILCAGGRPSPVFDIKAVSISPTNVILTWKSNDTAASEYKYVVKHKMENEKTITVVHQPWCNITGLRPATSYVFSITPGIGNETWGDPR

SEQ ID NO: 586 - protein, 151 aa, Homo sapiens
MDFWLWPLYFLPVSGALRILPEVKVEGELGGSVTIKCPLPEMHVRIYLCREMAGSGTCGTVVSTTNFIKAEYKGRVTLKQYPRKNLFLVEVTQLTESDSGVYACGAGMNTDRGKTQKVTLNVHSEYEPSWEEQPMPETPKWFHLPYLFQMP

SEQ ID NO: 587 - protein, 820 aa, Homo sapiens
MWSWKCLLFWAVLVTATLCTARPSPTLPEQAQPWGAPVEVESFLVHPGDLLQLRCRLRDDVQSINWLRDGVQLAESNRTRITGEEVEVQDSVPADSGLYACVTSSPSGSDTTYFSVNVSDALPSSEDDDDDDDSSSEEKETDNTKPNRMPVAPYWTSPEKMEKKLHAVPAAKTVKFKCPSSGTPNPTLRWLKNGKEFKPDHRIGGYKVRYATWSIIMDSVVPSDKGNYTCIVENEYGSINHTYQLDVVERSPHRPILQAGLPANKTVALGSNVEFMCKVYSDPQPHIQWLKHIEVNGSKIGPDNLPYVQILKTAGVNTTDKEMEVLHLRNVSFEDAGEYTCLAGNSIGLSHHSAWLTVLEALEERPAVMTSPLYLEIIIYCTGAFLISCMVGSVIVYKMKSGTKKSDFHSQMAVHKLAKSIPLRRQVSADSSASMNSGVLLVRPSRLSSSGTPMLAGVSEYELPEDPRWELPRDRLVLGKPLGEGCFGQVVLAEAIGLDKDKPNRVTKVAVKMLKSDATEKDLSDLISEMEMMKMIGKHKNIINLLGACTQDGPLYVIVEYASKGNLREYLQARRPPGLEYCYNPSHNPEEQLSSKDLVSCAYQVARGMEYLASKKCIHRDLAARNVLVTEDNVMKIADFGLARDIHHIDYYKKTTNGRLPVKWMAPEALFDRIYTHQSDVWSFGVLLWEIFTLGGSPYPGVPVEELFKLLKEGHRMDKPSNCTNELYMMMRDCWHAVPSQRPTFKQLVEDLDRIVALTSNQEYLDLSMPLDQYSPSFPDTRSSTCSSGEDSVFSHEPLPEEPCLPRHPAQLANGGLKRR

SEQ ID NO: 588 - protein, 364 aa, Homo sapiens
MQRLGATLLCLLLAAAVPTAPAPAPTATSAPVKPGPALSYPQEEATLNEMFREVEELMEDTQHKLRSAVEEMEAEEAAAKASSEVNLANLPPSYHNETNTDTKVGNNTIHVHREIHKITNNQTGQMVFSETVITSVGDEEGRRSHECIIDEDCGPSMYCQFASFQYTCQPCRGQRMLCTRDSECCGDQLCVWGHCTKMATRGSNGTICDNQRDCQPGLCCAFQRGLLFPVCTPLPVEGELCHDPASRLLDLITWELEPDGALDRCPCASGLLCQPHRLPRLEPGFVPSLPSHSLVYVCKPTFVGSRDQDGEILLPREVPDEYEVGSFMEEVRQELEDLERSLTEEMALREPAAAAAALLGGEEI

SEQ ID NO: 589 - protein, 22 aa, Homo sapiens
MAGQGLPLHVATLLTGLLECLG

SEQ ID NO: 590 - protein, 639 aa, Homo sapiens
MLLWLLLLILTPGREQSGVAPKAVLLLNPPWSTAFKGEKVALICSSISHSLAQGDTYWYHDEKLLKIKHDKIQITEPGNYQCKTRGSSLSDAVHVEFSPDWLILQALHPVFEGDNVILRCQGKDNKNTHQKVYYKDGKQLPNSYNLEKITVNSVSRDNSKYHCTAYRKFYILDIEVTSKPLNIQVQGVPVSNVNLEIRPTGGQLIEGENMVLICSVAQGSGTVTFSWHKEGRVRSLGRKTQRSLLAELHVLTVKESDAGRYYCAADNVHSPILSTWIRVTVRIPVSHPVLTFRAPRAHTVVGDLLELHCESLRGSPPILYRFYHEDVTLGNSSAPSGGGASFNLSLTAEHSGNYSCDADNGLGAQHSHGVSLRVTVPVSRPVLTLRAPGAQAVVGDLLELHCESLRGSFPILYWFYHEDDTLGNISAHSGGGASFNLSLTTEHSGNYSCEADNGLGAQHSKVVTLNVTGTSRNRTGLTAAGITGLVLSILVLAAAAALLHYARARRKPGGLSATGTSSHSPSECQEPSSSRPSRIDPQEPTHSKPLAPMELEPMYSNVNPGDSNPIYSQIWSIQHTKENSANCPMMHQEHEELTVLYSELKKTHPDDSAGEASSRGRAHEEDDEENYENVPRVLLASDH

SEQ ID NO: 591 - protein, 145 aa, Homo sapiens
MWSWKCLLFWAVLVTATLCTARPSPTLPEQDALPSSEDDDDDDDSSSEEKETDNTKPNPVAPYWTSPEKMEKKLHAVPAAKTVKFKCPSSGTPNPTLRWLKNGKEFKPDHRIGGYKVRYATWSIIMDSVVPSDKGNYTCIVENEY

SEQ ID NO: 592 - protein, 194 aa, Homo sapiens
MWVKLLSIVAEFCFSPFLVTDEETASDALERNSLSSQDPQQPTSTVSVTEDSSTSEIDKEEKEQTTQDPDLTTEANPQYLGLARKKSGILLLTLVSFLIFILFIIVQLFIMKLRKAHVIWKKENEVSEHTLESYRSRSNNEETSSEEKNGQSSHPMRCMNYITKLYSEAKTKRKENVQHSKLEEKHIQVPESIV

SEQ ID NO: 593 - protein, 479 aa, Homo sapiens
MLTSKGQGFLHGGLCLWLCVFTPFFKGCVGCATEERLFHKLFSHYNQFIRPVENVSDPVTVHFEVAITQLANVIWNDYKLRWDPMEYDGIETLRVPADKIWKPDIVLYNNAVGDFQVEGKTKALLKYNGMITWTPPAIFKSSCPMDITFFPFDHQNCSLKFGSWTYDKAEIDLLIIGSKVDMNDFWENSEWEIIDASGYKHDIKYNCCEEIYTDITYSFYIRRLPMFYTINLIIPCLFISFLTVLVFYLPSDCGEKVTLCISVLLSLTVFLLVITETIPSTSLVVPLVGEYLLFTMIFVTLSIVVTVFVLNIHYRTPTTHTMPRWVKTVFLKLLPQVLLMRWPLDKTRGTGSDAVPRGLARRPAKGKLASHGEPRHLKECFHCHKSNELATSKRRLSHQPLQWVVENSEHSPEVEDVINSVQFIAENMKSHNETKEVEDDWKYVAMVVDRVFLWVFIIVCVFGTAGLFLQPLLGNTGKS

SEQ ID NO: 594 - protein, 79 aa, Homo sapiens
MAGGRCGPQLTALLAAWIAAVAATAGPEEAALPPEQSRVQPMTASNWTLVMEGEWMLKLYRYVLEEKGHSVTSTCSMNT

SEQ ID NO: 595 - protein, 192 aa, Homo sapiens
MVTSSFPISVAVFALITLQVGTQDSFIAAVYEHAVILPNKTETPVSQEDALNLMNENIDILETAIKQAAEQGARIIVTPEDALYGWKFTRETVFPYLEDIPDPQVNWIPCQDPHRFGHTPVQARLSCLAKDNSIYVLANLGDKKPCNSRDSTCPPNGYFQYNTNVVYNTEGKLVARYHKETLQSVKRSFAVI

SEQ ID NO: 596 - protein, 90 aa, Homo sapiens
MQPILLLLAFLLLPRADAGEIIGGHEAKPHSRPYMAYLMIWDQKSLKRCGGFLIRDDFVLTAAHCWGSWRERPSGPELCSPSGYLATRPR

SEQ ID NO: 597 - protein, 211 aa, Homo sapiens
ALTAHPSCLLALLVAGLAQGIRGPLRAQDLGPQPLELKEAFKLFQIQFNRSYLSPEEHAHRLDIFAHNLAQAQRLQEEDLGTAEFGVTPFSDLTEEEFGQLYGYRRAAGGVPSMGREIRSEEPEESVPFSCDWRKVASAISPIKDQKNCNCCWAMAAAGNIETLWRISFWDFVDVSVQGGLASEKDYPFQGKVRAHRCHPKKYQKVAWIQD

SEQ ID NO: 598 - protein, 85 aa, Homo sapiens
MWSWKCLLFWAVLVTATLCTARPSPTLPEQDALPSSEDDDDDDDSSSEEKETDNTKPNPVAPYWTSPEKMEKKLHAVPAAKTVKF

SEQ ID NO: 599 - protein, 298 aa, Homo sapiens
MWSWKCLLFWAVLVTATLCTARPSPTLPEQAQPWGAPVEVESFLVHPGDLLQLRCRLRDDVQSINWLRDGVQLAESNRTRITGEEVEVQDSVPADSGLYACVTSSPSGSDTTYFSVNVSDALPSSEDDDDDDDSSSEEKETDNTKPNRMPVAPYWTSPEKMEKKLHAVPAAKTVKFKCPSSGTPNPTLRWLKNGKEFKPDHRIGGYKVRYATWSIIMDSVVPSDKGNYTCIVENEYGSINHTYQLDVVERSPHRPILQAGLPANKTVALGSNVEFMCKVYSDPQPHIQWLKHIEVNGS

SEQ ID NO: 600 - protein, 659 aa, Homo sapiens
SLLAVVVLLALPVAWGQCNAPEWLPFARPTNLTDEFEFPIGTYLNYECRPGYSGRPFSIICLKNSVWTGAKDRCRRKSCRNPPDPVNGMVHVIKGIQFGSQIKYSCTKGYRLIGSSSATCIISGDTVIWDNETPICDRIPCGLPPTITNGDFISTNRENFHYGSVVTYRCNPGSGGRKVFELVGEPSIYCTSNDDQVGIWSGPAPQCIIPNKCTPPNVENGILVSDNRSLFSLNEVVEFRCQPGFVMKGPRRVKCQALNKWEPELPSCSRVCQPPPDVLHAERTQRDKDNFSPGQEVFYSCEPGYDLRGAASMRCTPQGDWSPAAPTCEVKSCDDFMGQLLNGRVLFPVNLQLGAKVDFVCDEGFQLKGSSASYCVLAGMESLWNSSVPVCEQIFCPNPPAILNGRHTGTPFGDIPYGKEISYACDTHPDRGMTFNLIGESSIRCTSDPQGNGVWSSPAPRCELSVPAACPHPPKIQNGHYIGGHVSLYLPGMTISYICDPGYLLVGKGFIFCTDQGIWSQLDHYCKEVNCSFPLFMNGISKELEMKKVYHYGDYVTLKCEDGYTLEGSPWSQCQADDRWDPPLAKCTSRTHDALIVGTLSGTIFFILLIIFLSWIILKHRKGNNAHENPKEVAIHLHSQGGSSVHPRTLQTNEENSRY

SEQ ID NO: 601 - protein, 234 aa, Homo sapiens
MQRLGATLLCLLLAAAVPTAPAPAPTATSAPVKPGPALSYPQEEATLNEMFREVEELMEDTQHKLRSAVEEMEAEEAAAKASSEVNLANLPPSYHNETNTDTKVGNNTIHVHREIHKITNNQTGQMVFSETVITSVGDEEGRRSHECIIDEDCGPSMYCQFASFQYTCQPCRGQRMLCTRDSECCGDQLCVWGHCTKMATRGSNGTICDNQRDCQPGLCCAFQRGLLFPVCTPL

SEQ ID NO: 602 - protein, 142 aa, Homo sapiens
MWSWKCLLFWAVLVTATLCTARPSPTLPEQDALPSSEDDDDDDDSSSEEKETDNTKPNRMPVAPYWTSPEKMEKKLHAVPAAKTVKFKCPSSGTPNPTLRWLKNGKEFKPDHRIGGYKVRYATWSIIMDSVVPSDKGNYTCI

SEQ ID NO: 603 - protein, 94 aa, Homo sapiens
MLPCLVVLLAALLSLRLGSDAHGTELPSPPSVWFEAEFFHHILHWTPIPNQSESTCYEVALLSDSDSWQCEPRDPQWLHPREDSATQAQDGPRK

SEQ ID NO: 604 - protein, 740 aa, Homo sapiens
MLLWLLLLILTPGREQSGVAPKAVLLLNPPWSTAFKGEKVALICSSISHSLAQGDTYWYHDEKLLKIKHDKIQITEPGNYQCKTRGSSLSDAVHVEFSPDWLILQALHPVFEGDNVILRCQGKDNKNTHQKVYYKDGKQLPNSYNLEKITVNSVSRDNSKYHCTAYRKFYILDIEVTSKPLNIQVQELFLHPVLRASSSTPIEGSPMTLTCETQLSPQRPDVQLQFSLFRDSQTLGLGWSRSPRLQIPAMWTEDSGSYWCEVETVTHSIKKRSLRSQIRVQRVPVSNVNLEIRPTGGQLIEGENMVLICSVAQGSGTVTFSWHKEGRVRSLGRKTQRSLLAELHVLTVKESDAGRYYCAADNVHSPILSTWIRVTVRTLLSPSVPVSHPVLTFRAPRAHTVVGDLLELHCESLRGSPPILYRFYHEDVTLGNSSAPSGGGASFNLSLTAEHSGNYSCDADNGLGAQHSHGVSLRVTVPVSRPVLTLRAPGAQAVVGDLLELHCESLRGSFPILYWFYHEDDTLGNISAHSGGGASFNLSLTTEHSGNYSCEADNGLGAQHSKVVTLNVTGTSRNRTGLTAAGITGLVLSILVLAAAAALLHYARARRKPGGLSATGTSSHSPSECQEPSSSRPSRIDPQEPTHSKPLAPMELEPMYSNVNPGDSNPIYSQIWSIQHTKENSANCPMMHQEHEELTVLYSELKKTHPDDSAGEASSRGRAHEEDDEENYENVPRVLLASDH

SEQ ID NO: 605 - protein, 146 aa, Homo sapiens
MKPAAREARLPPRSPGLRWALPLLLLLLRLGQILCAGGTPSPIPDPSVATVATGENGITQISSTAESFHKQNGTGTPQVETNTSEDGESSGANDSLRTPEQGSNGTDGASQKTPSSTEPIPVSDLRVALTGVRKAALSWSNGNGTA

SEQ ID NO: 606 - protein, 198 aa, Homo sapiens
MAGGRCGPQLTALLAAWIAAVAATAGPEEAALPPEQSRVQPMTASNWTLVMEGEWMLKFYAPWCPSCQQTDSEWEAFAKNGEILQISVGKVDVIQEPGIFEDLQNYILEKKWQSVEPLTGWKSPASLTMSGMAGLFSISGKIWHLHNYFTVTLGIPAWCSYVFFVIATLVFGLFMGLVLVVISECFYVPLPRHLSERS

SEQ ID NO: 607 - protein, 97 aa, Homo sapiens
MLRGPWRQLWLFFLLLLPGAPEPRGASRPWEGTDEPGSAWAWPGFQRLQEQLRAAGALSKRYWTLFSCQVWPDDCDEDEEAATGPLALGNVRCGHAW

SEQ ID NO: 608 - protein, 113 aa, Homo sapiens
MRNAVCIFYLVLRALDTLEDDMTISVEKKVPLLHNFHSFLYQPDWRFMESKEKDRQVLEDFPTISLEFRNLAEKYQTVIADICRRMGIGMAEFLDKHVTSEQEWDKPQSLKTP

SEQ ID NO: 609 - protein, 154 aa, Homo sapiens
MAGIPGLLFLLFFLLCAVGQVSPYSAPWKPTWPAYRLPVVLPQSTLNLAKPDFGAEAKLEVSSSCGPQCHKGTPLPTYEEAKQYLSYETLYANGSRTETQVGIYILSSSGDGAQHRDSGSSGKSRRKRQIYGYDSRFSIFGKDFLLNYPFSTSV

SEQ ID NO: 610 - protein, 39 aa, Homo sapiens
MRWRTILLQYCFLLITCLLTALEAVPIDIDKTKVQNIHP

SEQ ID NO: 611 - protein, 104 aa, Homo sapiens
MNLQPIFWIGLISSVCCVFAQTDENRCLKANAKSCGECIQAGPNCGWCTNSTFLQEGMPTSARCDDLEALKKKGCPPDDIENPRGSKDIKKNKNVTNRSKGTAE

SEQ ID NO: 612 - protein, 1437 aa, Homo sapiens
MIWYVATFIASVIGTRGLAAEGAHGLREEPEFVTARAGESVVLRCDVIHPVTGQPPPYVVEWFKFGVPIPIFIKFGYYPPHVDPEYAGRASLHDKASLRLEQVRSEDQGWYECKVLMLDQQYDTFHNGSWVHLTINAPPTFTETPPQYIEAKEGGSITMTCTAFGNPKPIVTWLKEGTLLGASGKYQVSDGSLTVTSVSREDRGAYTCRAYSIQGEAVHTTHLLVQGPPFIVSPPENITVNISQDALLTCRAEAYPGNLTYTWYWQDENVYFQNDLKLRVRILIDGTLIIFRVKPEDSGKYTCVPSNSLGRSPSASAYLTVQYPARVLNMPPVIYVPVGIHGYIRCPVDAEPPATVVKWNKDGRPLQVEKNLGWTLMEDGSIRIEEATEEALGTYTCVPYNTLGTMGQSAPARLVLKDPPYFTVLPGWEYRQEAGRELLIPCAAAGDPFPVITWRKVGKPSRSKHSALPSGSLQFRALSKEDHGEWECVATNVVTSITASTHLTVIGTSPHAPGSVRVQVSMTTANVSWEPGYDGGYEQTFSVWMKRAQFGPHDWLSLPVPPGPSWLLVDTLEPETAYQFSVLAQNKLGTSAFSEVVTVNTLAFPITTPEPLVLVTPPRCLIANRTQQGVLLSWLPPANHSFPIDRYIMEFRVAERWELLDDGIPGTEGEFFAKDLSQDTWYEFRVLAVMQDLISEPSNIAGVSSTDIFPQPDLTEDGLARPVLAGIVATICFLAAAILFSTLAACFVNKQRKRKLKRKKDPPLSITHCRKSLESPLSSGKVSPESIRTLRAPSESSDDQGQPAAKRMLSPTREKELSLYKKTKRAISSKKYSVAKAEAEAEATTPIELISRGPDGRFVMDPAEMEPSLKSRRIEGFPFAEETDMYPEFRQSDEENEDPLVPTSVAALKSQLTPLSSSQESYLPPPAYSPRFQPRGLEGPGGLEGRLQATGQARPPAPRPFHHGQYYGYLSSSSPGEVEPPPFYVPEVGSPLSSVMSSPPLPTEGPFGHPTIPEENGENASNSTLPLTQTPTGGRSPEPWGRPEFPFGGLETPAMMFPHQLPPCDVPESLQPKAGLPRGLPPTSLQVPAAYPGILSLEAPKGWAGKSPGRGPVPAPPAAKWQDRPMQPLVSQGQLRHTSQGMGIPVLPYPEPAEPGAHGGPSTFGLDTRWYEPQPRPRPSPRQARRAEPSLHQVVLQPSRLSPLTQSPLSSRTGSPELAARARPRPGLLQQAEMSEITLQPPAAVSFSRKSTPSTGSPSQSSRSGSPSYRPAMGFTTLATGYPSPPPGPAPAGPGDSLDVFGQTPSPRRTGEELLRPETPPPTLPTSGTLPPAPGNAAAPERLEALKYQRIKKPKKSSKGSSKSKKRSDDSASQTQQLPNSQVLWPDEAVCLRKKKRHSRPDPFARLSDLCHRQLPEDQTAILNSVDHDDPGHATLL

SEQ ID NO: 613 - protein, 364 aa, Homo sapiens
MALTAHPSCLLALLVAGLAQGIRGPLRAQDLGPQPLELKEAFKLFQIQFNRSYLSPEEHAHRLDIFAHNLAQAQRLQEEDLGTAEFGVTPFSDLTEEEFGQLYGYRRAAGGVPSMGREIRSEEPEESVPFSCDWRKVASAISPIKDQKNCNCCWAMAAAGNIETLWRISFWDFVDVSVQELLDCGRCGDGCHGGFVWDAFITVLNNSGLASEKDYPFQGKVRAHRCHPKKYQKVAWIQDFIMLQNNEHRIAQYLATYGPITVTINMKPLQLYRKGVIKATPTTCDPQLVDHSVLLVGFGSVKSEEGIWAETVSSQSQPQPPHPTPYWILKNSWGAQWGEKVSVIYWGRGQGRTGLFPPSRPYVP

SEQ ID NO: 614 - protein, 183 aa, Homo sapiens
MQRLGATLLCLLLAAAVPTAPAPAPTATSAPVKPGPALSYPQEEATLNEMFREVEELMEDTQHKLRSAVEEMEAEEAAAKASSEVNLANLPPSYHNETNTDTKVGNNTIHVHREIHKECIIDEDCGPSMYCQFASFQYTCQPCRGQRMLCTRDSECCGDQLCVWGHCTKMATRGSNGTICDNQ

SEQ ID NO: 615 - protein, 136 aa, Homo sapiens
MSWKKALRIPGDLRVATVTLMLAMLSSLLAEGRDSPEDFVFQFKGMCYFTNGTERVRLVTRYIYNREEYARFDSDVGVYRAVTPQGRPDAEYWNSQKEVLEGTRAELDTVCRHNYEVAFRGILQRRGMVTGLSRSW

SEQ ID NO: 616 - protein, 125 aa, Homo sapiens
MDFWLWPLYFLPVSGALRILPEVKVEGELGGSVTIKCPLPEMHVRIYLCREMAGSGTCGTVVSTTNFIKAEYKGRVTLKQYPRKNLFLVENTSHHGKSSQCLRLQNGFICPICSRCLHMPVLPNS

SEQ ID NO: 617 - protein, 195 aa, Homo sapiens
MVTSSFPISVAVFALITLQVGTQDSFIAAVYEHAVILPNKTETPVSQEDALNLMNENIDILETAIKQAAEQGARIIVTPEDALYGWKFTRETVFPYLEDIPDPQVNWIPCQDPHRFGHTPVQARLSCLAKDNSIYVLANLGDKKPCNSRDSTCPPNGYFQYNTNVVYNTEGKLVARYHKEVVFMHQMVPKCIIMT

SEQ ID NO: 618 - protein, 299 aa, Homo sapiens
MVTSSFPISVAVFALITLQVGTQDSFIAAVYEHAVILPNKTETPVSQEDALNLMNENIDILETAIKQAAEQGARIIVTPEDALYGWKFTRETVFPYLEDIPDPQVNWIPCQDPHRFGHTPVQARLSCLAKDNSIYVLANLGDKKPCNSRDSTCPPNGYFQYNTNVVYNTEGKLVARYHKVCTLLKCKTTNLTTCGRPVETASTRFEMFSLSGTFGTEYVFPEVLLTEIHLSPGKFEVLKDGRLVNKNGSSGPILTVSLFGRWYTKDSLYSSCGTSNSAITYLLIFILLMIIALQNIVML

SEQ ID NO: 619 - protein, 841 aa, Homo sapiens
GPLRLLALLLLLLLLLLLQLQHLAAAAADPLLGGQGPAKDCEKDQFQCRNERCIPSVWRCDEDDDCLDHSDEDDCPKKTCADSDFTCDNGHCIHERWKCDGEEECPDGSDESEATCTKQVCPAEKLSCGPTSHKCVPASWRCDGEKDCEGGADEAGCATSLGTCRGDEFQCGDGTCVLAIKHCNQEQDCPDGSDEAGCLQVPPTFLGNRRRPRGLNECLHNNGGCSHICTDLKIGFECTCPAGFQLLDQKTCGDIDECKDPDACSQICVNYKGYFKCECYPGYEMDLLTKNCKAAAGKSPSLIFTNRHEVRRIDLVKRNYSRLIPMLKNVVALDVEVATNRIYWCDLSYRKIYSAYMDKASDPKEQEVLIDEQLHSPEGLAVDWVHKHIYWTDSGNKTISVATVDGGRRRTLFSRNLSEPRAIAVDPLRGFMYWSDWGDQAKIEKSGLNGVDRQTLVSDNIEWPNGITLDLLSQRLYWVDSKLHQLSSIDFSGGNRKTLISSTDFLSHPFGIAVFEDKVFWTDLENEAIFSANRLNGLEISILAENLNNPHDIVIFHELKQPRAPDACELSVQPNGGCEYLCLPAPQISSHSPKYTCACPDTMWLGPDMKRCYRAPQSTSTTTLASTMTRTVPATTRAPGTTVHRSTYQNHSTETPSLTAAVPSSVSVPRAPSISPSTLSPATSNHSQHYANEDSKMGSTVTAAVIGIIVPIVVIALLCMSGYLIWRNWKRKNTKSMNFDNPVYRKTTEEEDEDELHIGRTAQIGHVYPAAISSFDRPLWAEPCLGETREPEDPAPALKELFVLPGEPRSQLHQLPKNPLSELPVVKSKRVALSLEDDGLP

SEQ ID NO: 620 - protein, 147 aa, Homo sapiens
MDFWLWPLYFLPVSGALRILPEVKVEGELGGSVTIKCPLPEMHVRIYLCREMAGSGTCGTVVSTTNFIKAEYKGRVTLKQYPRKNLFLVEVTQLTESDSGVYACGAGMNTDRGKTQKVTLNVHSEYEPSWEEQPMPETPKWFHLPYL

SEQ ID NO: 621 - protein, 733 aa, Homo sapiens
MVSYWDTGVLLCALLSCLLLTGSSSGSKLKDPELSLKGTQHIMQAGQTLHLQCRGEAAHKWSLPEMVSKESERLSITKSACGRNGKQFCSTLTLNTAQANHTGFYSCKYLAVPTSKKKETESAIYIFISDTGRPFVEMYSEIPEIIHMTEGRELVIPCRVTSPNITVTLKKFPLDTLIPDGKRIIWDSRKGFIISNATYKEIGLLTCEATVNGHLYKTNYLTHRQTNTIIDVQISTPRPVKLLRGHTLVLNCTATTPLNTRVQMTWSYPDEKNKRASVRRRIDQSNSHANIFYSVLTIDKMQNKDKGLYTCRVRSGPSFKSVNTSVHIYDKAFITVKHRKQQVLETVAGKRSYRLSMKVKAFPSPEVVWLKDGLPATEKSARYLTRGYSLIIKDVTEEDAGNYTILLSIKQSNVFKNLTATLIVNVKPQIYEKAVSSFPDPALYPLGSRQILTCTAYGIPQPTIKWFWHPCNHNHSEARCDFCSNNEESFILDADSNMGNRIESITQRMAIIEGKNKMASTLVVADSRISGIYICIASNKVGTVGRNISFYITDVPNGFHVNLEKMPTEGEDLKLSCTVNKFLYRDVTWILLRTVNNRTMHYSISKQKMAITKEHSITLNLTIMNVSLQDSGTYACRARNVYTGEEILQKKEITIRDQEAPYLLRNLSDHTVAISSSTTLDCHANGVPEPQITWFKNNHKIQQEPELYTSTSPSSSSSSPLSSSSSSSSSSSS

SEQ ID NO: 622 - protein, 682 aa, Homo sapiens
MGPWGWKLRWTVALLLAAAGTAVGDRCERNEFQCQDGKCISYKWVCDGSAECQDGSDESQETCLSVTCKSGDFSCGGRVNRCIPQFWRCDGQVDCDNGSDEQGCPVATCRPDEFQCSDGNCIHGSRQCDREYDCKDMSDEVGCVNVTLCEGPNKFKCHSGECITLDKVCNMARDCRDWSDEPIKECGTNECLDNNGGCSHVCNDLKIGYECLCPDGFQLVAQRRCEDIDECQDPDTCSQLCVNLEGGYKCQCEEGFQLDPHTKACKAVGSIAYLFFTNRHEVRKMTLDRSEYTSLIPNLRNVVALDTEVASNRIYWSDLSQRMICSTQLDRAHGVSSYDTVISRDIQAPDGLAVDWIHSNIYWTDSVLGTVSVADTKGVKRKTLFRENGSKPRAIVVDPVHGFMYWTDWGTPAKIKKGGLNGVDIYSLVTENIQWPNGITLDLLSGRLYWVDSKLHSISSIDVNGGNRKTILEDEKRLAHPFSLAVFEDKVFWTDIINEAIFSANRLTGSDVNLLAENLLSPEDMVLFHNLTQPREAEAAVATQETSTVRLKVSSTAVRTQHTTTRPVPDTSRLPGATPGLTTVEIVTMSHQALGDVAGRGNEKKPSSVRALSIVLPIVLLVFLCLGVFLLWKNWRLKNINSINFDNPVYQKTTEDEVHICHNQDGYSYPSRQMVSLEDDVA

SEQ ID NO: 623 - protein, 423 aa, Homo sapiens [sequence omitted]

SEQ ID NO: 624 - protein, 819 aa, Homo sapiens
MGPWGWKLRWTVALLLAAAGTAVGDRCERNEFQCQDGKCISYKWVCDGSAECQDGSDESQETCSPKTCSQDEFRCHDGKCISRQFVCDSDRDCLDGSDEASCPVLTCGPASFQCNSSTCIPQLWACDNDPDCEDGSDEWPQRCRGLYVFQGDSSPCSAFEFHCLSGECIHSSWRCDGGPDCKDKSDEENCAVATCRPDEFQCSDGNCIHGSRQCDREYDCKDMSDEVGCVNVTLCEGPNKFKCHSGECITLDKVCNMARDCRDWSDEPIKECGTNECLDNNGGCSHVCNDLKIGYECLCPDGFQLVAQRRCEDIDECQDPDTCSQLCVNLEGGYKCQCEEGFQLDPHTKACKAVGSIAYLFFTNRHEVRKMTLDRSEYTSLIPNLRNVVALDTEVASNRIYWSDLSQRMICSTQLDRAHGVSSYDTVISRDIQAPDGLAVDWIHSNIYWTDSVLGTVSVADTKGVKRKTLFRENGSKPRAIVVDPVHGFMYWTDWGTPAKIKKGGLNGVDIYSLVTENIQWPNGITLDLLSGRLYWVDSKLHSISSIDVNGGNRKTILEDEKRLAHPFSLAVFEDKVFWTDIINEAIFSANRLTGSDVNLLAENLLSPEDMVLFHNLTQPRGVNWCERTTLSNGGCQYLCLPAPQINPHSPKFTCACPDGMLLARDMRSCLTEAEAAVATQETSTVRLKVSSTAVRTQHTTTRPVPDTSRLPGATPGLTTVEIVTMSHQALGDVAGRGNEKKPSSVRALSIVLPIVLLVFLCLGVFLLWKNWRLKNINSINFDNPVYQKTTEDEVHICHNQDGYSYPSRQMVSLEDDVA

SEQ ID NO: 625 - protein, 148 aa, Homo sapiens
MRVTLATIAWMVSFVSNYSHTANILPDIENEDFIKDCVRIHNKFRSEVKPTASDMLYMTWDPALAQIAKAWASNCQFSHNTRLKPPHKLHPNFTSLGENIWTGSVPIFSVSSAITNWYDEIQDYDFKTRICKKVCGHYTQRELPNLAI

SEQ ID NO: 626 - protein, 858 aa, Homo sapiens
MGDHLDLLLGVVLMAGPVFGIPSCSFDGRIAFYRFCNLTQVPQVLNTTERLLLSFNYIRTVTASSFPFLEQLQLLELGSQYTPLTIDKEAFRNLPNLRILDLGSSKIYFLHPDAFQGLFHLFELRLYFCGLSDAVLKDGYFRNLKALTRLDLSKNQIRSLYLHPSFGKLNSLKSIDFSSNQIFLVCEHELEPLQGKTLSFFSLAANSLYSRVSVDWGKCMNPFRNMVLEILDVSGNGWTVDITGNFSNAISKSQAFSLILAHHIMGAGFGFHNIKDPDQNTFAGLARSSVRHLDLSHGFVFSLNSRVFETLKDLKVLNLAYNKINKIADEAFYGLDNLQVLNLSYNLLGELYSSNFYGLPKVAYIDLQKNHIAIIQDQTFKFLEKLQTLDLRDNALTTIHFIPSIPDIFLSGNKLVTLPKINLTANLIHLSENRLENLDILYFLLRVPHLQILILNQNRFSSCSGDQTPSENPSLEQLFLGENMLQLAWETELCWDVFEGLSHLQVLYLNHNYLNSLPPGVFSHLTALRGLSLNSNRLTVLSHNDLPANLEILDISRNQLLAPNPDVFVSLSVLDITHNKFICECELSTFINWLNHTNVTIAGPPADIYCVYPDSFSGVSLFSLSTEGCDEEEVLKSLKFSLFIVCTVTLTLFLMTILTVTKFRGFCFICYKTAQRLVFKDHPQGTEPDMYKYDAYLCFSSKDFTWVQNALLKHLDTQYSDQNRFNLCFEERDFVPGENRIANIQDAIWNSRKIVCLVSRHFLRDGWCLEAFSYAQGRCLSDLNSALIMVVVGSLSQYQLMKHQSIRGFVQKQQYLRWPEDLQDVGWFLHKLSQQILKKEKEKKKDNNIPLQTVATIS

SEQ ID NO: 627 - protein, 1152 aa, Homo sapiens
MALRVLLLTALTLCHGFNLDTENAMTFQENARGFGQSVVQLQGSRVVVGAPQEIVAANQRGSLYQCDYSTGSCEPIRLQVPVEAVNMSLGLSLAATTSPPQLLACGPTVHQTCSENTYVKGLCFLFGSNLRQQPQKFPEALRGCPQEDSDIAFLIDGSGSIIPHDFRRMKEFVSTVMEQLKKSKTLFSLMQYSEEFRIHFTFKEFQNNPNPRSLVKPITQLLGRTHTATGIRKVVRELFNITNGARKNAFKILVVITDGEKFGDPLGYEDVIPEADREGVIRYVIGVGDAFRSEKSRQELNTIASKPPRDHVFQVNNFEALKTIQNQLREKIFAIEGTQTGSSSSFEHEMSQEGFSAAITSNGPLLSTVGSYDWAGGVFLYTSKEKSTFINMTRVDSDMNDAYLGYAAAIILRNRVQSLVLGAPRYQHIGLVAMFRQNTGMWESNANVKGTQIGAYFGASLCSVDVDSNGSTDLVLIGAPHYYEQTRGGQVSVCPLPRGRARWQCDAVLYGEQGQPWGRFGAALTVLGDVNGDKLTDVAIGAPGEEDNRGAVYLFHGTSGSGISPSHSQRIAGSKLSPRLQYFGQSLSGGQDLTMDGLVDLTVGAQGHVLLLRSQPVLRVKAIMEFNPREVARNVFECNDQVVKGKEAGEVRVCLHVQKSTRDRLREGQIQSVVTYDLALDSGRPHSRAVFNETKNSTRRQTQVLGLTQTCETLKLQLPNCIEDPVSPIVLRLNFSLVGTPLSAFGNLRPVLAEDAQRLFTALFPFEKNCGNDNICQDDLSITFSFMSLDCLVVGGPREFNVTVTVRNDGEDSYRTQVTFFFPLDLSYRKVSTLQNQRSQRSWRLACESASSTEVSGALKSTSCSINHPIFPENSEVTFNITFDVDSKASLGNKLLLKANVTSENNMPRTNKTEFQLELPVKYAVYMVVTSHGVSTKYLNFTASENTSRVMQHQYQVSNLGQRSLPISLVFLVPVRLNQTVIWDRPQVTFSENLSSTCHTKERLPSHSDFLAELRKAPVVNCSIAVCQRIQCDIPFFGIQEEFNATLKGNLSFDWYIKTSHNHLLIVSTAEILFNDSVFTLLPGQGAFVRSQTETKVEPFEVPNPLPLIVGSSVGGLLLLALITAALYKLGFFKRQYKDMMSEGGPPGAEPQ

SEQ ID NO: 628 - protein, 1568 aa, Homo sapiens
MGAVLRSLLACSFCVLLRAAPLLLYANRRDLRLVDATNGKENATIVVGGLEDAAAVDFVFSHGLIYWSDVSEEAIKRTEFNKTESVQNVVVSGLLSPDGLACDWLGEKLYWTDSETNRIEVSNLDGSLRKVLFWQELDQPRAIALDPSSGFMYWTDWGEVPKIERAGMDGSSRFIIINSEIYWPNGLTLDYEEQKLYWADAKLNFIHKSNLDGTNRQAVVKGSLPHPFALTLFEDILYWTDWSTHSILACNKYTGEGLREIHSDIFSPMDIHAFSQQRQPNATNPCGIDNGGCSHLCLMSPVKPFYQCACPTGVKLLENGKTCKDGATELLLLARRTDLRRISLDTPDFTDIVLQLEDIRHAIAIDYDPVEGYIYWTDDEVRAIRRSFIDGSGSQFVVTAQIAHPDGIAVDWVARNLYWTDTGTDRIEVTRLNGTMRKILISEDLEEPRAIVLDPMVGYMYWTDWGEIPKIERAALDGSDRVVLVNTSLGWPNGLALDYDEGKIYWGDAKTDKIEVMNTDGTGRRVLVEDKIPHIFGFTLLGDYVYWTDWQRRSIERVHKRSAEREVIIDQLPDLMGLKATNVHRVIGSNPCAEENGGCSHLCLYRPQGLRCACPIGFELISDMKTCIVPEAFLLFSRRADIRRISLETNNNNVAIPLTGVKEASALDFDVTDNRIYWTDISLKTISRAFMNGSALEHVVEFGLDYPEGMAVDWLGKNLYWADTGTNRIEVSKLDGQHRQVLVWKDLDSPRALALDPAEGFMYWTEWGGKPKIDRAAMDGSERTTLVPNVGRANGLTIDYAKRRLYWTDLDTNLIESSNMLGLNREVIADDLPHPFGLTQYQDYIYWTDWSRRSIERANKTSGQNRTIIQGHLDYVMDILVFHSSRQSGWNECASSNGHCSHLCLAVPVGGFVCGCPAHYSLNADNRTCSAPTTFLLFSQKSAINRMVIDEQQSPDIILPIHSLRNVRAIDYDPLDKQLYWIDSRQNMIRKAQEDGSQGFTVVVSSVPSQNLEIQPYDLSIDIYSRYIYWTCEATNVINVTRLDGRSVGVVLKGEQDRPRAVVVNPEKGYMYFTNLQERSPKIERAALDGTEREVLFFSGLSKPIALALDSRLGKLFWADSDLRRIESSDLSGANRIVLEDSNILQPVGLTVFENWLYWIDKQQQMIEKIDMTGREGRTKVQARIAQLSDIHAVKELNLQEYRQHPCAQDNGGCSHICLVKGDGTTRCSCPMHLVLLQDELSCGESQFQCASGQCIDGALRCNGDANCQDKSDEKNCEVLCLIDQFRCANGQCIGKHKKCDHNVDCSDKSDELDCYPTEEPAPQATNTVGSVIGVIVTIFVSGTVYFICQRMLCPRMKGDGETMTNDYVVHGPASVPLGYVPHPSSLSGSLPGMSRGKSMISSLSIMGGSSGPPYDRAHVTGASSSSSSSTKGTYFPAILNPPPSPATERSHYTMEFGYSSNSPSTHRSYSYRPYSYRHFAPPTTPCSTDVCDSDYAPSRRMTSVATAKGYTSDLNYDSEPVPPPPTPRSQYLSAEENYESCPPSPYTERSYSHHLYPPPPSPCTDSS

SEQ ID NO: 629 - protein, 541 aa, Homo sapiens
MVSYWDTGVLLCALLSCLLLTGSSSGSKLKDPELSLKGTQHIMQAGQTLHLQCRGEAAHKWSLPEMVSKESERLSITKSACGRNGKQFCSTLTLNTAQANHTGFYSCKYLAVPTSKKKETESAIYIFISDTGRPFVEMYSEIPEIIHMTEGRELVIPCRVTSPNITVTLKKFPLDTLIPDGKRIIWDSRKGFIISNATYKEIGLLTCEATVNGHLYKTNYLTHRQTNTIIDVQISTPRPVKLLRGHTLVLNCTATTPLNTRVQMTWSYPDEKNKRASVRRRIDQSNSHANIFYSVLTIDKMQNKDKGLYTCRVRSGPSFKSVNTSVHIYDKAFITVKHRKQQVLETVAGKRSYRLSMKVKAFPSPEVVWLKDGLPATEKSARYLTRGYSLIIKDVTEEDAGNYTILLSIKQSNVFKNLTATLIVNVKPQIYEKAVSSFPDPALYPLGSRQILTCTAYGIPQPTIKWFWHPCNHNHSEARCDFCSNNEESFILDADSNMGNRIESITQRMAIIEGKNKLPPANSSFMLPPTSFSSNYFHFLP

SEQ ID NO: 630 - protein, 169 aa, Homo sapiens
RFLAGVPTPKSHLQLLGAVCMFLASKLKETSPLTAEKLCIYTDNSIKPQELLEWELVVLGKLKWNLAAVTPHDFIEHILRKLPQQREKLSLIRKHAQTFIALCATAQQVGQGKGKGCNQEMPQERLRGVSKSQRPAPDSISASFRVARRLLLLRHVCHVQHSSQTHSLD

SEQ ID NO: 631 - protein, 158 aa, Homo sapiens
MAVFKTTLWRLISGTLGIICLSLMSTLGILLKNYSDCCSCQEKWVGYRCNCYFISSEQKTWNESRHLCASQKSSLLQLQNTDELDFMSSSQQFYWIGLSYSEEHTAWLWENGSALSQYLFPSFETFNTKNCIAYNPNGNALDESCEDKNRYICKQQLI

SEQ ID NO: 632 - protein, 134 aa, Homo sapiens
MTLLLLPLLLASLLASCSCNKANKHKPWIEAEYQGIVMENDNTVLLNPPLFALDKDAPLRYAGEICGFRLHGSGVPFEAVILDKATGEGLIRAKEPVDCEAQKEHTFTIQAYDCGEGPDGANTKKSHKATVHVR

SEQ ID NO: 633 - protein, 149 aa, Homo sapiens
MAGIFYFALFSCLFGICDAVTGSRVYPANEVTLLDSRSVQGELGWIASPLEGGWEEVSIMDEKNTPIRTYQVCNVMEPSQNNWLRTDWITREGAQRVYIEIKFTLRDCNSLPGVMGTCKETFNLYYYESDNDKERFIRENQFVKIDTIA

SEQ ID NO: 634 - protein, 343 aa, Homo sapiens
MPRPRLLAALCGALLCAPSLLVALECVEPLGLENGNIANSQIAASSVRVTFLGLQHWVPELARLNRAGMVNAWTPSSNDDNPWIQVNLLRRMWVTGVVTQGASRLASHEYLKAFKVAYSLNGHEFDFIHDVNKKHKEFVGNWNKNAVHVNLFETPVEAQYVRLYPTSCHTACTLRFELLGCELNGCANPLGLKNNSIPDKQITASSSYKTWGLHLFSWNPSYARLDKQGNFNAWVAGSYGNDQWLQVDLGSSKEVTGIITQGARNFGSVQFVASYKVAYSNDSANWTEYQDPRTGSSKIFPGNWDNHSHKKNLFETPILARYVRILPVAWHNRIALRLELLGC

SEQ ID NO: 635 - protein, 1860 aa, Homo sapiens
MGWGSRCCCPGRLDLLCVLALLGGCLLPVCRTRVYTNHWAVKIAGGFPEANRIASKYGFINIGQIGALKDYYHFYHSRTIKRSVISSRGTHSFISMEPKVEWIQQQVVKKRTKRDYDFSRAQSTYFNDPKWPSMWYMHCSDNTHPCQSDMNIEGAWKRGYTGKNIVVTILDDGIERTHPDLMQNYDALASCDVNGNDLDPMPRYDASNENKHGTRCAGEVAAAANNSHCTVGIAFNAKIGGVRMLDGDVTDMVEAKSVSFNPQHVHIYSASWGPDDDGKTVDGPAPLTRQAFENGVRMGRRGLGSVFVWASGNGGRSKDHCSCDGYTNSIYTISISSTAESGKKPWYLEECSSTLATTYSSGESYDKKIITTDLRQRCTDNHTGTSASAPMAAGIIALALEANPFLTWRDVQHVIVRTSRAGHLNANDWKTNAAGFKVSHLYGFGLMDAEAMVMEAEKWTTVPRQHVCVESTDRQIKTIRPNSAVRSIYKASGCSDNPNRHVNYLEHVVVRITITHPRRGDLAIYLTSPSGTRSQLLANRLFDHSMEGFKNWEFMTIHCWGERAAGDWVLEVYDTPSQLRNFKTPGKLKEWSLVLYGTSVQPYSPTNEFPKVERFRYSRVEDPTDDYGTEDYAGPCDPECSEVGCDGPGPDHCNDCLHYYYKLKNNTRICVSSCPPGHYHADKKRCRKCAPNCESCFGSHGDQCMSCKYGYFLNEETNSCVTHCPDGSYQDTKKNLCRKCSENCKTCTEFHNCTECRDGLSLQGSRCSVSCEDGRYFNGQDCQPCHRFCATCAGAGADGCINCTEGYFMEDGRCVQSCSISYYFDHSSENGYKSCKKCDISCLTCNGPGFKNCTSCPSGYLLDLGMCQMGAICKDGEYVDEHGHCQTCEASCAKCQGPTQEDCTTCPMTRIFDDGRCVSNCPSWKFEFENQCHPCHHTCQRCQGSGPTHCTSCGADNYGREHFLYQGECGDSCPEGHYATEGNTCLPCPDNCELCHSVHVCTRCMKGYFIAPTNHTCQKLECGQGEVQDPDYEECVPCEEGCLGCSLDDPGTCTSCAMGYYRFDHHCYKTCPEKTYSEEVECKACDSNCGSCDQNGCYWCEEGFFLLGGSCVRKCGPGFYGDQEMGECESCHRACETCTGPGHDECSSCQEGLQLLRGMCVHATKTQEEGKFWNDILRKLQPCHSSCKTCNGSATLCTSCPKGAYLLAQACVSSCPQGTWPSVRSGSCENCTEACAICSGADLCKKCQMQPGHPLFLHEGRCYSKCPEGSYAEDGICERCSSPCRTCEGNATNCHSCEGGHVLHHGVCQENCPERHVAVKGVCKHCPEMCQDCIHEKTCKECTPEFFLHDDMCHQSCPRGFYADSRHCVPCHKDCLECSGPKADDCELCLESSWVLYDGLCLEECPAGTYYEKETKECRDCHKSCLTCSSSGTCTTCQKGLIMNPRGSCMANEKCSPSEYWDEDAPGCKPCHVKCFHCMGPAEDQCQTCPMNSLLLNTTCVKDCPEGYYADEDSNRCAHCHSSCRTCEGRHSRQCHSCRPGWFQLGKECLLQCREGYYADNSTGRCERCNRSCKGCQGPRPTDCLSCDRFFFLLRSKGECHRSCPDHYYVEQSTQTCERCHPTCDQCKGKGALNCLSCVWSYHLMGGICTSDCLVGEYRVGEGEKFNCEKCHESCMECKGPGAKNCTLCPANLVLHMDDSHCLHCCNTSDPPSAQECCDCQDTTDECILRTSKVRPATEHFKTALFITSSMMLVLLLGAAVVVWKKSRGRVQPAAKAGYEKLADPNKSYSSYKSSYRESTSFEEDQVIEYRDRDYDEDDDDDIVYMGQDGTVYRKFKYGLLDDDDIDELEYDDESYSYYQ

SEQ ID NO: 636 - protein, 105 aa, Homo sapiens
MKGWGWLALLLGALLGTAWARRSQDLHCGACRALVDELEWEIAQVDPKKTIQMGSFRINPDGSQSVVENASCLVLAARHASASSTNLKDILADLIPKEQARIKTF

SEQ ID NO: 637 - protein, 383 aa, Homo sapiens
MEAAVAAPRPRLLLLVLAAAAAAAAALLPGATALQCFCHLCTKDNFTCVTDGLCFVSVTETTDKVIHNSMCIAEIDLIPRDRPFVCAPSSKTGSVTTTYCCNQDHCNKIELPTTGPFSVKSSPGLGPVELAAVIAGPVCFVCISLMLMVYICHNRTVIHHRVPNEEDPSLDRPFISEGTTLKDLIYDMTTSGSGSGLPLLVQRTIARTIVLQESIGKGRFGEVWRGKWRGEEVAVKIFSSREERSWFREAEIYQTVMLRHENILGFIAADNKDNGTWTQLWLVSDYHEHGSLFDYLNRYTVTVEGMIKLALSTASGLAHLHMEIVGTQGKPAIAHRDLKSKNILVKKNGTCCIADLGLAVRHDSATDTIDIAPNHRVGTKRNS

SEQ ID NO: 638 - protein, 249 aa, Homo sapiens
MDFPCLWLGLLLPLVAALDFNYHRQEGMEAFLKTVAQNYSSVTHLHSIGKSVKGRNLWVLVVGRFPKEHRIGIPEFKYVANMHGDETVGRELLLHLIDYLVTSDGKDPEITNLINSTRIHIMPSMNPDGFEAVKKPDCYYSIGRENYNQYDLNRNFPDAFEYNNVSRQPETVAVMKWLKTETFVLSANLHGGALVASYPFDNGVQATGALYSRSLTPDDDVFQYLAHTYASRNPNMKKGDECKNKMNFP

SEQ ID NO: 639 - protein, 82 aa, Homo sapiens
MKGWGWLALLLGALLGTAWARRSQDLHCGACRALVDELEWEIAQVDPKKTIQMGSFRINPDGSQSVVEIPEIARHGFTYCGR

SEQ ID NO: 640 - protein, 321 aa, Homo sapiens
MESRVLLRTFCLIFGLGAVWGLGVDPSLQIDVLTELELGESTTGVRQVPGLHNGTKAFLFQDTPRSIKASTATAEQFFQKLRNKHEFTILVTLKQTHLNSGVILSIHHLDHRYLELESSGHRNEVRLHYRSGSHRPHTEVFPYILADDKWHKLSLAISASHLILHIDCNKIYERVVEKPSTDLPLGTTFWLGQRNNAHGYFKGIMQDVQLLVMPQGFIAQCPDLNRTCPTCNDFHGLVQKIMELQDILAKTSAKLSRAEQRMNRLDQCYCERTCTMKGTTYREFESWIDGCKNCTCLNGTIQCETLICPNPDCPLKSALAY

SEQ ID NO: 641 - protein, 507 aa, Homo sapiens
MEAAVAAPRPRLLLLVLAAAAAAAAALLPGATALQCFCHLCTKDNFTCVTDGLCFVSVTETTDKVIHNSMCIAEIDLIPRDRPFVCAPSSKTGSVTTTYCCNQDHCNKIELPTTGPFSVKSSPGLGPVELAAVIAGPVCFVCISLMLMVYICHNRTVIHHRVPNEEDPSLDRPFISEGTTLKDLIYDMTTSGSGSGLPLLVQRTIARTIVLQESIGKGRFGEVWRGKWRGEEVAVKIFSSREERSWFREAEIYQTVMLRHENILGFIAADNKDNGTWTQLWLVSDYHEHGSLFDYLNRYTVTVEGMIKLALSTASGLAHLHMEIVGTQGKPAIAHRDLKSKNILVKKNGTCCIADLGLAVRHDSATDTIDIAPNHRVGTKRYMAPEVLDDSINMKHFESFKRADIYAMGLVFWEIARRCSIGGIHEDYQLPYYDLVPSDPSVEEMRKVVCEQKLRPNIPNRWQSCEALRVMAKIMRECWYANGAARLTALRIKKTLSQLSQQEGIKM

SEQ ID NO: 642 - protein, 412 aa, Homo sapiens
MPLQLLLLLILLGPGNSLQLWDTWADEAEKALGPLLARDRRQATEYEYLDYDFLPETEPPEMLRNSTDTTPLTGPGTPESTTVEPAARRSTGLDAGGAVTELTTELANMGNLSTDSAAMEIQTTQPAATEAQTTQPVPTEAQTTPLAATEAQTTRLTATEAQTTPLAATEAQTTPPAATEAQTTQPTGLEAQTTAPAAMEAQTTAPAAMEAQTTPPAAMEAQTTQTTAMEAQTTAPEATEAQTTQPTATEAQTTPLAAMEALSTEPSATEALSMEPTTKRGLFIPFSVSSVTHKGIPMAASNLSVNYPVGAPDHISVKQCLLAILILALVATIFFVCTVVLAVRLSRKGHMYPVRNYSPTEMVCISSLLPDGGEGPSATANGGLSKAKSPGLTPEPREDREGDDLTLHSFLP

SEQ ID NO: 643 - protein, 921 aa, Homo sapiens
MRANDALQVLGLLFSLARGSEVGNSQAVCPGTLNGLSVTGDAENQYQTLYKLYERCEVVMGNLEIVLTGHNADLSFLQWIREVTGYVLVAMNEFSTLPLPNLRVVRGTQVYDGKFAIFVMLNYNTNSSHALRQLRLTQLTEILSGGVYIEKNDKLCHMDTIDWRDIVRDRDAEIVVKDNGRSCPPCHEVCKGRCWGPGSEDCQTLTKTICAPQCNGHCFGPNPNQCCHDECAGGCSGPQDTDCFACRHFNDSGACVPRCPQPLVYNKLTFQLEPNPHTKYQYGGVCVASCPHNFVVDQTSCVRACPPDKMEVDKNGLKMCEPCGGLCPKACEGTGSGSRFQTVDSSNIDGFVNCTKILGNLDFLITGLNGDPWHKIPALDPEKLNVFRTVREITGYLNIQSWPPHMHNFSVFSNLTTIGGRSLYNRGFSLLIMKNLNVTSLGFRSLKEISAGRIYISANRQLCYHHSLNWTKVLRGPTEERLDIKHNRPRRDCVAEGKVCDPLCSSGGCWGPGPGQCLSCRNYSRGGVCVTHCNFLNGEPREFAHEAECFSCHPECQPMEGTATCNGSGSDTCAQCAHFRDGPHCVSSCPHGVLGAKGPIYKYPDVQNECRPCHENCTQGCKGPELQDCLGQTLVLIGKTHLTMALTVIAGLVVIFMMLGGTFLYWRGRRIQNKRAMRRYLERGESIEPLDPSEKANKVLARIFKETELRKLKVLGSGVFGTVHKGVWIPEGESIKIPVCIKVIEDKSGRQSFQAVTDHMLAIGSLDHAHIVRLLGLCPGSSLQLVTQYLPLGSLLDHVRQHRGALGPQLLLNWGVQIAKGMYYLEEHGMVHRNLAARNVLLKSPSQVQVADFGVADLLPPDDKQLLYSEAKTPIKWMALESIHFGKYTHQSDVWSYGQCIWMPSLPSLAPVSNLPFETPS

SEQ ID NO: 644 - protein, 112 aa, Homo sapiens
MESRVLLRTFCLIFGLGAVWGLGVDPSLQIDVLTELELGESTTGVRQVPGLHNGTKAFLFQDTPRSIKASTATAEQFFQKLRNKHEFTILVTLKQTHLNSGVILSIHHLDHR

SEQ ID NO: 645 - protein, 110 aa, Homo sapiens
METGLGAPLFKAWLLISVWGLGVDPSLQIDVLTELELGESTTGVRQVPGLHNGTKAFLFQDTPRSIKASTATAEQFFQKLRNKHEFTILVTLKQTHLNSGVILSIHHLDH

SEQ ID NO: 646 - protein, 768 aa, Homo sapiens
METGLGAPLFKAWLLISVWGLGVDPSLQIDVLTELELGESTTGVRQVPGLHNGTKAFLFQDTPRSIKASTATAEQFFQKLRNKHEFTILVTLKQTHLNSGVILSIHHLDHRYLELESSGHRNEVRLHYRSGSHRPHTEVFPYILADDKWHKLSLAISASHLILHIDCNKIYERVVEKPSTDLPLGTTFWLGQRNNAHGYFKGIMQDVQLLVMPQGFIAQCPDLNRTCPTCNDFHGLVQKIMELQDILAKTSAKLSRAEQRMNRLDQCYCERTCTMKGTTYREFESWIDGCKNCTCLNGTIQCETLICPNPDCPLKSALAYVDGKCCKECKSICQFQGRTYFEGERNTVYSSSGVCVLYECKDQTMKLVESSGCPALDCPESHQITLSHSCCKVCKGYDFCSERHNCMENSICRNLNDRAVCSCRDGFRALREDNAYCEDIDECAEGRHYCRENTMCVNTPGSFMCICKTGYIRIDDYSCTEHDECITNQHNCDENALCFNTVGGHNCVCKPGYTGNGTTCKAFCKDGCRNGGACIAANVCACPQGFTGPSCETDIDECGTGRHSCANDTICFNLDGGYDCRCPHGKNCTGDCIHDGKVKHNGQIWVLENDRCSVCSCQNGFVMCRRMVCDCENPTVDLFCCPECDPRLSSQCLHQNGETLYNSGDTWVQNCQQCRCLQGEVDCWPLPCPDVECEFSILPENECCPRCVTDPCQADTIRNDITKTCLDEMNVVRFTGSSWIKHGTECTLCQCKNGHICCSVDPQCLQEL

SEQ ID NO: 647 - protein, 137 aa, Homo sapiens
MKALIVLGLVLLSVTVQGKVFERCELARTLKRLGMDGYRGISLANWMCLAKWESGYNTRATNYNAGDRSTDYGIFQINSRYWCNDGKTPGAVNACHLSCSGWHGEIVVKTEMSVSMFKVVECNSRIFLLQLILSLSH

SEQ ID NO: 648 - protein, 136 aa, Homo sapiens
MDFPCLWLGLLLPLVAALDFNYHRQEGMEAFLKTVAQNYSSVTHLHSIGKSVKGRNLWVLVVGRFPKEHRIGIPEFKYVANMHGDETVGRELLLHLIDYLVTSDGKDPEITNLINSTRIHIMPSMNPDGFEAVKKP

SEQ ID NO: 649 - protein, 104 aa, Homo sapiens
MKALIVLGLVLLSVTVQGKVFERCELARTLKRLGMDGYRGISLANWMCLAKWESGYNTRATNYNAGDRSTDYGIFQINSRYWCNDGKTPGAVNACHLSCSGKTS

SEQ ID NO: 650 - protein, 115 aa, Homo sapiens
MQPFLLLLAFLLTPGAGTEEIIGGHEAKPHSRPYMAFVQFLQEKSRKRCGGILVRKDFVLTAAHCQGRGDSGGPLVCKDVAQGILSYGNKKGTPPGVYIKVSHFLPWIKRTMKRL

SEQ ID NO: 651 - protein, 297 aa, Homo sapiens
MEACKDSRIGGMMKTLLLFVGLLLTWESGQVLGDQTVSDNELQEMSNQGSKYVNKEIQNAVNGVKQIKTLIEKTNEERKTLLSNLEEAKKKKEDALNETRESETKLKELPGVCNETMMALWEECKPCLKQTCMKFYARVCRSGSGLVGRQLEEFLNQSSPFYFWMNGDRIDSLLENDRQQTHMLDVMQDHFSRASSIIDELFQDRFFTREPQDTYHYLPFSLPHRRPHFFFPKSRIVRSLMPFSPYEPLNFHAMFQPFLEMIHEAQQAMDIHFHSPAFQHPPTEFIREGDDDRTVCR

SEQ ID NO: 652 - protein, 858 aa, Homo sapiens
MGPWGWKLRWTVALLLAAAGTAVGDRCERNEFQCQDGKCISYKWVCDGSAECQDGSDESQETCLSVTCKSGDFSCGGRVNRCIPQFWRCDGQVDCDNGSDEQGCPPKTCSQDEFRCHDGKCISRQFVCDSDRDCLDGSDEASCPVLTCGPASFQCNSSTCIPQLWACDNDPDCEDGSDEWPQRCRGLYVFQGDSSPCSAFEFHCLSGECIHSSWRCDGGPDCKDKSDEENCAVATCRPDEFQCSDGNCIHGSRQCDREYDCKDMSDEVGCVNVTLCEGPNKFKCHSGECITLDKVCNMARDCRDWSDEPIKECGTNECLDNNGGCSHVCNDLKIGYECLCPDGFQLVAQRRCEDIDECQDPDTCSQLCVNLEGGYKCQCEEGFQLDPHTKACKAVGSIAYLFFTNRHEVRKMTLDRSEYTSLIPNLRNVVALDTEVASNRIYWSDLSQRMICSTQLDRAHGVSSYDTVISRDIQAPDGLAVDWIHSNIYWTDSVLGTVSVADTKGVKRKTLFRENGSKPRAIVVDPVHGFMYWTDWGTPAKIKKGGLNGVDIYSLVTENIQWPNGITLDLLSGRLYWVDSKLHSISSIDVNGGNRKTILEDEKRLAHPFSLAVFEDKVFWTDIINEAIFSANRLTGSDVNLLAENLLSPEDMVLFHNLTQPRGVNWCERTTLSNGGCQYLCLPAPQINPHSPKFTCACPDGMLLARDMRSCLTEAEAAVATQETSTVRLKVSSTAVRTQHTTTRPVPDTSRLPGATPGLTTVEIVTMSHQALGDVAGRGNEKKPSSVRALSIVLPIVLLVFLCLGVFLLWKNWRLKNINSINFDNPVYQKTTEDEVHICHNQDGYSYPSMVSLEDDVA

SEQ ID NO: 653 - protein, 948 aa, Homo sapiens
MGPWGWKLRWTVALLLAAAGTAVGDRCERNEFQCQDGKCISYKWVCDGSAECQDGSDESQETCLSVTCKSGDFSCGGRVNRCIPQFWRCDGQVDCDNGSDEQGCPPKTCSQDEFRCHDGKCISRQFVCDSDRDCLDGSDEASCPVLTCGPASFQCNSSTCIPQLWACDNDPDCEDGSDEWPQRCRGLYVFQGDSSPCSAFEFHCLSGECIHSSWRCDGGPDCKDKSDEENCAVATCRPDEFQCSDGNCIHGSRQCDREYDCKDMSDEVGCVNVTLCEGPNKFKCHSGECITLDKVCNMARDCRDWSDEPIKECGTNECLDNNGGCSHVCNDLKIGYECLCPDGFQLVAQRRCEDIDECQDPDTCSQLCVNLEGGYKCQCEEGFQLDPHTKACKAVGSIAYLFFTNRHEVRKMTLDRSEYTSLIPNLRNVVALDTEVASNRIYWSDLSQRMICSTQLDRAHGVSSYDTVISRDIQAPDGLAVDWIHSNIYWTDSVLGTVSVADTKGVKRKTLFRENGSKPRAIVVDPVHGFMYWTDWGTPAKIKKGGLNGVDIYSLVTENIQWPNGITLDLLSGRLYWVDSKLHSISSIDVNGGNRKTILEDEKRLAHPFSLAVFEDKVFWTDIINEAIFSANRLTGSDVNLLAENLLSPEDMVLFHNLTQPRGVNWCERTTLSNGGCQYLCLPAPQINPHSPKFTCACPDGMLLARDMRSCLTEAEAAVATQETSTVRLKVSSTAVRTQHTTTRPVPDTSRLPGATPGLTTVEIVTMSHQALGDVAGRGNEKKPSSVRALSIVLPIATELGLWSRGQLCDRACLSLQCSSSSFAWGSSFYGRTGGLRTSTASTLTTPSIRRPQRMRSTFATTRTATATPRDRWSVWRMTWREHLPGVPSLPRTLPETSPALFYSKTEKTKALPARALFYIFIHLGGRTGFGQCPCNGLGWDFGFFLSS

SEQ ID NO: 654 - protein, 860 aa, Homo sapiens [sequence omitted]

SEQ ID NO: 655 - protein, 698 aa, Homo sapiens
MAACGRVRRMFRLSAALHLLLLFAAGAEKLPGQGVHSQGQGPGANFVSFVGQAGGGGPAGQQLPQLPQSSQLQQQQQQQQQQQQPQPPQPPFPAGGPPARRGGAGAGGGWKLAEEESCREDVTRVCPKHTWSNNLAVLECLQDVREPENEISSDCNHLLWNYKLNLTTDPKFESVAREVCKSTITEIKECADEPVGKGYMVSCLVDHRGNITEYQCHQYITKMTAIIFSDYRLICGFMDDCKNDINILKCGSIRLGEKDAHSQGEVVSCLEKGLVKEAEEREPKIQVSELCKKAILRVAELSSDDFHLDRHLYFACRDDRERFCENTQAGEGRVYKCLFNHKFEESMSEKCREALTTRQKLIAQDYKVSYSLAKSCKSDLKKYRCNVENLPRSREARLSYLLMCLESAVHRGRQVSSECQGEMLDYRRMLMEDFSLSPEIILSCRGEIEHHCSGLHRKGRTLHCLMKVVRGEKGNLGMNCQQALQTLIQETDPGADYRIDRALNEACESVIQTACKHIRSGDPMILSCLMEHLYTEKMVEDCEHRLLELQYFISRDWKLDPVLYRKCQGDASRLCHTHGWNETSEFMPQGAVFSCLYRHAYRTEEQGRRLSRECRAEVQRILHQRAMDVKLDPALQDKCLIDLGKWCSEKTETGQELECLQDHLDDLVVECRDIVGNLTELESEAEREYVFKNLPFKV

SEQ ID NO: 656 - protein, 1169 aa, Homo sapiens
MTRTRAALLLFTALATSLGFNLDTEELTAFRVDSAGFGDSVVQYANSWVVVGAPQKITAANQTGGLYQCGYSTGACEPIGLQVPPEAVNMSLGLSLASTTSPSQLLACGPTVHHECGRNMYLTGLCFLLGPTQLTQRLPVSRQECPRQEQDIVFLIDGSGSISSRNFATMMNFVRAVISQFQRPSTQFSLMQFSNKFQTHFTFEEFRRSSNPLSLLASVHQLQGFTYTATAIQNVVHRLFHASYGARRDAAKILIVITDGKKEGDSLDYKDVIPMADAAGIIRYAIGVGLAFQNRNSWKELNDIASKPSQEHIFKVEDFDALKDIQNQLKEKIFAIEGTETTSSSSFELEMAQEGFSAVFTPDGPVLGAVGSFTWSGGAFLYPPNMSPTFINMSQENVDMRDSYLGYSTELALWKGVQSLVLGAPRYQHTGKAVIFTQVSRQWRMKAEVTGTQIGSYFGASLCSVDVDSDGSTDLVLIGAPHYYEQTRGGQVSVCPLPRGWRRWWCDAVLYGEQGHPWGRFGAALTVLGDVNGDKLTDVVIGAPGEEENRGAVYLFHGVLGPSISPSHSQRIAGSQLSSRLQYFGQALSGGQDLTQDGLVDLAVGARGQVLLLRTRPVLWVGVSMQFIPAEIPRSAFECREQVVSEQTLVQSNICLYIDKRSKNLLGSRDLQSSVTLDLALDPGRLSPRATFQETKNRSLSRVRVLGLKAHCENFNLLLPSCVEDSVTPITLRLNFTLVGKPLLAFRNLRPMLAADAQRYFTASLPFEKNCGADHICQDNLGISFSFPGLKSLLVGSNLELNAEVMVWNDGEDSYGTTITFSHPAGLSYRYVAEGQKQGQLRSLHLTCDSAPVGSQGTWSTSCRINHLIFRGGAQITFLATFDVSPKAVLGDRLLLTANVSSENNTPRTSKTTFQLELPVKYAVYTVVSSHEQFTKYLNFSESEEKESHVAMHRYQVNNLGQRDLPVSINFWVPVELNQEAVWMDVEVSHPQNPSLRCSSEKIAPPASDFLAHIQKNPVLDCSIAGCLRFRCDVPSFSVQEELDFTLKGNLSFGWVRQILQKKVSVVSVAEITFDTSVYSQLPGQEAFMRAQTTTVLEKYKVHNPTPLIVGSSIGGLLLLALITAVLYKVGFFKRQYKEMMEEANGQIAPENGTQTPSPPTPHYPQDNV

SEQ ID NO: 657 - protein, 66 aa, Homo sapiens
MGWLCSGLLFPVSCLVLLQVASSGLFRMPCGERKRVEARRSGGRSGVEEMRGSGSLWEVDLRTDWN

SEQ ID NO: 658 - protein, 10 aa, Homo sapiens
MGWLCSGLLF

SEQ ID NO: 659 - protein, 525 aa, Homo sapiens
MALERLCSVLKVLLITVLVVEGIAVAQKTQDGQNIGIKHIPATQCGIWVRTSNGGHFASPNYPDSYPPNKECIYILEAAPRQRIELTFDEHYYIEPSFECRFDHLEVRDGPFGFSPLIDRYCGVKSPPLIRSTGRFMWIKFSSDEELEGLGFRAKYSFIPDPDFTYLGGILNPIPDCQFELSGADGIVRSSQVEQEEKTKPGQAVDCIWTIKATPKAKIYLRFLDYQMEHSNECKRNFVAVYDGSSSIENLKAKFCSTVANDVMLKTGIGVIRMWADEGSRLSRFRMLFTSFVEPPCTSSTFFCHSNMCINNSLVCNGVQNCAYPWDENHCKEKKKAGVFEQITKTHGTIIGITSGIVLVLLIISILVQVKQPRKKVMACKTAFNKTGFQEVFDPPHYELFSLRDKEISADLADLSEELDNYQKMRRSSTASRCIHDHHCGSQASSVKQSRTNLSSMELPFRNDFAQPQPMKTFNSTFKKSSYTFKQGHECPEQALEDRVMEEIPCEIYVRGREDSAQASISIDF

SEQ ID NO: 660 - protein, 63 aa, Homo sapiens
MGWLCSGLLFPVSCLVLLQVASSGNMKVLQEPTCVSDYMSISTCEWKMNGPTNCSTELRLLYQ

SEQ ID NO: 661 - protein, 296 aa, Homo sapiens
MELALRRSPVPRWLLLLPLLLGLNAGAVIDWPTEEGKEVWDYVTVRKDAYMFWWLYYATNSCKNFSELPLVMWLQGGPGGSSTGFGNFEEIGPLDSDLKPRKTTWLQAASLLFVDNPVGTGFSYVNGSGAYAKDLAMVASDMMVLLKTFFSCHKEFQTVPFYIFSESYGGKMAAGIGLELYKAIQRGTIKCNFAGVALGDSWISPVDSVLSWGPYLYSMSLLEDKGLAEVSKVAEQVLNAVNKGLYREATELWGKAEMIIEQNTDGVNFYNILTKSTPTSTMESSLEFTQSHLVWF

SEQ ID NO: 662 - protein, 69 aa, Homo sapiens
MELALRRSPVPRWLLLLPLLLGLNAGSMGLCDGPQGCLHVLVALLCHQLLQELLRTAPGHVASGRSRRF

SEQ ID NO: 663 - protein, 227 aa, Homo sapiens
MSCPVPACCALLLVLGLCRARPRNALLLLADDGGFESGAYNNSAIATPHLDALARRSLLFRNAFTSVSSCSPSRASLLTGLPQASSGRSTWGRRPCTRLTLRTRRRMAPSSRWGGTSLELSCSSGNSCRLRMTGLSSSTSPSTTPTAVGTPSPSTEPSVRSLATERAAWVVSQTGPPRPTTHWTCWCLTSSPTPRQPEPTWPLSTPPSAAWTKELDWCSRSCVTPVS

SEQ ID NO: 664 - protein, 187 aa, Homo sapiens
MSCPVPACCALLLVLGLCRARPRNALLLLADDGGFESGAYNNSAIATPHLDALARRSLLFRNAFTSVSSCSPSRASLLTGLPQHQNGMYGLHQDVHHFNSFDKVRSLPLLLSQAGVRTGLSSRPGIIGKKHVGPETVYPFDFAYTEENGSVLQVGRNITRIKLLVRKFLQTQDDRPFFLYVAFHDPH

SEQ ID NO: 665 - protein, 147 aa, Homo sapiens
MELALRRSPVPRWLLLLPLLLGLNAGAVIDWPTEEGKEVWDYVTVRKDAYMFWWLYYATNSCKNFSELPLVMWLQGGPGGSSTGFGNFEEIGPFSEGPSSATLRGLPWVIPGSPLLIRCSPGDLTCTACLFSKTKVWQRCLRLQSKY

SEQ ID NO: 666 - protein, 807 aa, Homo sapiens
MRLSPAPLKLSRTPALLALALPLAAALAFSDETLDKVPKSEGYCSRILRAQGTRREGYTEFSLRVEGDPDFYKPGTSYRVTLSAAPPSYFRGFTLIALRENREGDKEEDHAGTFQIIDEEETQFMSNCPVAVTESTPRRRTRIQVFWIAPPAGTGCVILKASIVQKRIIYFQDEGSLTKKLCEQDSTFDGVTDKPILDCCACGTAKYRLTFYGNWSEKTHPKDYPRRANHWSAIIGGSHSKNYVLWEYGGYASEGVKQVAELGSPVKMEEEIRQQSDEVLTVIKAKAQWPAWQPLNVRAAPSAEFSVDRTRHLMSFLTMMGPSPDWNVGLSAEDLCTKECGWVQKVVQDLIPWDAGTDSGVTYESPNKPTIPQEKIRPLTSLDHPQSPFYDPEGGSITQVARVVIERIARKGEQCNIVPDNVDDIVADLAPEEKDEDDTPETCIYSNWSPWSACSSSTCDKGKRMRQRMLKAQLDLSVPCPDTQDFQPCMGPGCSDEDGSTCTMSEWITWSPCSISCGMGMRSRERYVKQFPEDGSVCTLPTEETEKCTVNEECSPSSCLMTEWGEWDECSATCGMGMKKRHRMIKMNPADGSMCKAETSQAEKCMMPECHTIPCLLSPWSEWSDCSVTCGKGMRTRQRMLKSLAELGDCNEDLEQVEKCMLPECPIDCELTEWSQWSECNKSCGKGHVIRTRMIQMEPQFGGAPCPETVQRKKCRIRKCLRNPSIQKLRWREARESRRSEQLKEESEGEQFPGCRMRPWTAWSECTKLCGGGIQERYMTVKKRFKSSQFTSCKDKKEIRACNVHPC

SEQ ID NO: 667 - protein, 108 aa, Homo sapiens
MSCPVPACCALLLVLGLCRARPRNALLLLADDGGFESGAYNNSAIATPHLDALARRSLLFRNAFTSVSSCSPSRASLLTGLPQAFLPLRRLPRPPPLWALPAPVRNLL

SEQ ID NO: 668 - protein, 182 aa, Homo sapiens
MASVDLSYCSFLHLLLLCSPILACPPLNGIRCVAYNNQSNRLAVSRTDGTVEIYNLSANYFQEKFFPGHESRATEALCWAEGQRLFSAGLNGEIMEYDLQALNIKYAMDAFGGPIWSMAASPSGSQLLVGCEDGSVKLFQITPDKIQFERNFDRQKSRILSLSWHPSGTHIAAGSIDYISVF

SEQ ID NO: 669 - protein, 176 aa, Homo sapiens
MELALRRSPVPRWLLLLPLLLGLNAGAVIDWPTEEGKEVWDYVTVRKDAYMFWWLYYATNSCKNFSELPLVMWLQLQAASLLFVDNPVGTGFSYVNGSGAYAKDLAMVASDMMVLLKTFFSCHKEFQTVPFYIFSESYGGKMAAGIGLELYKAIQRGTIKCNFAGVALGDSWISPV

SEQ ID NO: 670 - protein, 337 aa, Homo sapiens
MRGELWLLVLVLREAARALSPQPGAGHDEGPGSGWAAKGTVRGWNRRARESPGHVSEPDRTQLSQDLGGGTLAMDTLPDNRTRVVEDNHSYYVSRLYGPSEPHSRELWVDVAEANRSQVKIHTILSNTHRQASRVVLSFDFPFYGHPLRQITIATGGFIFMGDVIHRMLTATQYVAPLMANFNPGYSDNSTVVYFDNGTVFVVQWDHVYLQGWEDKGSFTFQAALHHDGRIVFAYKEIPMSVPEISSSQHPVKTGLSDAFMILNPSPDVPESRRRSIFEYHRIELDPSKVTSMSAVEFTPLPTCLQHRSCDACMSSDLTFNCSWCHVLQSRDEVSPC

SEQ ID NO: 671 - protein, 85 aa, Homo sapiens
MQTCPLAFPGHVSQALGTLLFLAASLSAQNEGWDSPICTEGVVSVSWGENTVMSCNISNAFSHVNIKLRAHGQESAIFNEVAPGY

SEQ ID NO: 672 - protein, 146 aa, Homo sapiens
MQTCPLAFPGHVSQALGTLLFLAASLSAQNEGWDSPICTEGVVSVSWGENTVMSCNISNAFSHVNIKLRAHGQESAIFNEVAPGYFSRDGWQLQVQGGVAQLVIKGARDSHAGLYMWHLVGHQRNNRQVTLEVSEPRGLKDRASAQ

SEQ ID NO: 673 - protein, 207 aa, Homo sapiens
MASFPPRVNEKEIVFLFFLLVRLRTIGELLAPAAPFDKKCGRENWTVAFAPDGSYFAWSQGHRTVKLVPWSQCLQNFLLHGTKNVTNSSSLRLPRQNSDGGQKNKPREHIIDCGDIVWSLAFGSSVPEKQSRCVNIEWHRFRFGQDQLLLATGLNNGRIKIWDVYTGKLLLNLVDHTEVVRDLTFAPDGSLILVSASRDKTLRVWDL

SEQ ID NO: 674 - protein, 178 aa, Homo sapiens
MQTCPLAFPGHVSQALGTLLFLAASLSAQNEGWDSPICTEGVVSVSWGENTVMSCNISNAFSHVNIKLRAHGQESAIFNEVAPGYFSRDGWQLQVQGGVAQLVIKGARDSHAGLYMWHLVGHQRNNRQVTLEVSGAEPQSAPDTGFWPVPAVVTAVFILLVALVMFAWYRCRCSQQRR

SEQ ID NO: 675 - protein, 170 aa, Homo sapiens
MQTCPLAFPGHVSQALGTLLFLAASLSAQNEGWDSPICTEGVVSVSWGENTVMSCNISNAFSHVNIKLRAHGQESAIFNEVAPGYFSRDGWQLQVQGGVAQLVIKGARDSHAGLYMWHLVGHQRNNRQVTLEVSEPRGLKDRASAQLLGPGTSRGAEPQSAPDTGFWPVP

SEQ ID NO: 676 - protein, 1465 aa, Homo sapiens
MRGLGTCLATLAGLLLTAAGETFSGGCLFDEPYSTCGYSQSEGDDFNWEQVNTLTKPTSDPWMPSGSFMLVNASGRPEGQRAHLLLPQLKENDTHCIDFHYFVSSKSNSPPGLLNVYVKVNNGPLGNPIWNISGDPTRTWNRAELAISTFWPNFYQVIFEVITSGHQGYLAIDEVKVLGHPCTRTPHFLRIQNVEVNAGQFATFQCSAIGRTVAGDRLWLQGIDVRDAPLKEIKVTSSRRFIASFNVVNTTKRDAGKYRCMIRTEGGVGISNYAELVVKEPPVPIAPPQLASVGATYLWIQLNANSINGDGPIVAREVEYCTASGSWNDRQPVDSTSYKIGHLDPDTEYEISVLLTRPGEGGTGSPGPALRTRTKCADPMRGPRKLEVVEVKSRQITIRWEPFGYNVTRCHSYNLTVHYCYQVGGQEQVREEVSWDTENSHPQHTITNLSPYTNVSVKLILMNPEGRKESQELIVQTDEDLPGAVPTESIQGSTFEEKIFLQWREPTQTYGVITLYEITYKAVSSFDPEIDLSNQSGRVSKLGNETHFLFFGLYPGTTYSFTIRASTAKGFGPPATNQFTTKISAPSMPAYELETPLNQTDNTVTVMLKPAHSRGAPVSVYQIVVEEERPRRTKKTTEILKCYPVPIHFQNASLLNSQYYFAAEFPADSLQAAQPFTIGDNKTYNGYWNTPLLPYKSYRIYFQAASRANGETKIDCVQVATKGAATPKPVPEPEKQTDHTVKIAGVIAGILLFVIIFLGVVLVMKKRKLAKKRKETMSSTRQEMTVMVNSMDKSYAEQGTNCDEAFSFMDTHNLNGRSVSSPSSFTMKTNTLSTSVPNSYYPDPFVPTAILVPINDETHTMASDTSSLVQSHTYKKREPADVPYQTGQLHPAIRVADLLQHITQMKCAEGYGFKEEYESFFEGQSAPWDSAKKDENRMKNRYGNIIAYDHSRVRLQTIEGDTNSDYINGNYIDGYHRPNHYIATQGPMQETIYDFWRMVWHENTASIIMVTNLVEVGRVKCCKYWPDDTEIYKDIKVTLIETELLAEYVIRTFAVEKRGVHEIREIRQFHFTGWPDHGVPYHATGLLGFVRQVKSKSPPSAGPLVVHCSAGAGRTGCFIVIDIMLDMAEREGVVDIYNCVRELRSRRVNMVQTEEQYVFIHDAILEACLCGDTSVPASQVRSLYYDMNKLDPQTNSSQIKEEFRTLNMVTPTLRVEDCSIALLPRNHEKNRCMDILPPDRCLPFLITIDGESSNYINAALMDSYKQPSAFIVTQHPLPNTVKDFWRLVLDYHCTSVVMLNDVDPAQLCPQYWPENGVHRHGPIQVEFVSADLEEDIISRIFRIYNAARPQDGYRMVQQFQFLGWPMYRDTPVSKRSFLKLIRQVDKWQEEYNGGEGRTVVHCLNGGGRSGTFCAISIVCEMLRHQRTVDVFHAVKTLRNNKPNMVDLLDQYKFCYEVALEYLNSG

SEQ ID NO: 677 - protein, 149 aa, Homo sapiens
MQTCPLAFPGHVSQALGTLLFLAASLSAQNEGWDSPICTEGVVSVSWGENTVMSCNISNAFSHVNIKLRAHGQESAIFNEVAPGYFSRDGWQLQVQGGVAQLVIKGARDSHAGLYMWHLVGHQRNNRQVTLEVSGAAVPSNAGRRSSSS

SEQ ID NO: 678 - protein, 43 aa, Homo sapiens
MQTCPLAFPGHVSQALGTLLFLAASLSAQNEAACPRAGERHLQ

SEQ ID NO: 679 - protein, 739 aa, Homo sapiens
MGQGWATAGLPSLLFLLLCYGHPLLVPSQEASQQVTVTHGTSSQATTSSQTTTHQATAHQTSAQSPNLVTDEAEASKFVEEYDRTSQVVWNEYAEANWNYNTNITTETSKILLQKNMQIANHTLKYGTQARKFDVNQLQNTTIKRIIKKVQDLERAALPAQELEEYNKILLDMETTYSVATVCHPNGSCLQLEPDLTNVMATSRKYEDLLWAWEGWRDKAGRAILQFYPKYVELINQAARLNGYVDAGDSWRSMYETPSLEQDLERLFQELQPLYLNLHAYVRRALHRHYGAQHINLEGPIPAHLLGNMWAQTWSNIYDLVVPFPSAPSMDTTEAMLKQGWTPRRMFKEADDFFTSLGLLPVPPEFWNKSMLEKPTDGREVVCHASAWDFYNGKDFRIKQCTTVNLEDLVVAHHEMGHIQYFMQYKDLPVALREGANPGFHEAIGDVLALSVSTPKHLHSLNLLSSEGGSDEHDINFLMKMALDKIAFIPFSYLVDQWRWRVFDGSITKENYNQEWWSLRLKYQGLCPPVPRTQGDFDPGAKFHIPSSVPYIRYFVSFIIQFQFHEALCQAAGHTGPLHKCDIYQSKEAGQRLATAMKLGFSRPWPEAMQLITGQPNMSASAMLSYFKPLLDWLRTENELHGEKLGWPQYNWTPNSDDFYNETETKIFLQFYDQTGIWDHGAPHLLPPSQARGTREAPVYMSKRAASSGPPGSPKLPPAAQGHGEVPVHDLLWHPGPPV

SEQ ID NO: 680 - protein, 44 aa, Homo sapiens
MQTCPLAFPGHVSQALGTLLFLAASLSAQNEGWDSPICTEGVVS

SEQ ID NO: 681 - protein, 1910 aa, Homo sapiens
MAPTWGPGMVSVVGPMGLLVVLLVGGCAAEEPPRFIKEPKDQIGVSGGVASFVCQATGDPKPRVTWNKKGKKVNSQRFETIEFDESAGAVLRIQPLRTPRDENVYECVAQNSVGEITVHAKLTVLREDQLPSGFPNIDMGPQLKVVERTRTATMLCAASGNPDPEITWFKDFLPVDPSASNGRIKQLRSGALQIESSEETDQGKYECVATNSAGVRYSSPANLYVRVRRVAPRFSILPMSHEIMPGGNVNITCVAVGSPMPYVKWMQGAEDLTPEDDMPVGRNVLELTDVKDSANYTCVAMSSLGVIEAVAQITVKSLPKAPGTPMVTENTATSITITWDSGNPDPVSYYVIEYKSKSQDGPYQIKEDITTTRYSIGGLSPNSEYEIWVSAVNSIGQGPPSESVVTRTGEQAPASAPRNVQARMLSATTMIVQWEEPVEPNGLIRGYRVYYTMEPEHPVGNWQKHNVDDSLLTTVGSLLEDETYTVRVLAFTSVGDGPLSDPIQVKTQQGVPGQPMNLRAEARSETSITLSWSPPRQESIIKYELLFREGDHGREVGRTFDPTTSYVVEDLKPNTEYAFRLAARSPQGLGAFTPVVRQRTLQSKPSAPPQDVKCVSVRSTAILVSWRPPPPETHNGALVGYSVRYRPLGSEDPEPKEVNGIPPTTTQILLEALEKWTQYRITTVAHTEVGPGPESSPVVVRTDEDVPSAPPRKVEAEALNATAIRVLWRSPAPGRQHGQIRGYQVHYVRMEGAEARGPPRIKDVMLADAQEMVITNLQPETAYSITVAAYTMKGDGARSKPKVVVTKGAVLGRPTLSVQQTPEGSLLARWEPPAGTAEDQVLGYRLQFGREDSTPLATLEFPPSEDRYTASGVHKGATYVFRLAARSRGGLGEEAAEVLSIPEDTPRGHPQILEAAGNASAGTVLLRWLPPVPAERNGAIVKYTVAVREAGALGPARETELPAAAEPGAENALTLQGLKPDTAYDLQVRAHTRRGPGPFSPPVRYRTFLRDQVSPKNFKVKMIMKTSVLLSWEFPDNYNSPTPYKIQYNGLTLDVDGRTTKKLITHLKPHTFYNFVLTNRGSSLGGLQQTVTAWTAFNLLNGKPSVAPKPDADGFIMVYLPDGQSPVPVQSYFIVMVPLRKSRGGQFLTPLGSPEDMDLEELIQDISRLQRRSLRHSRQLEVPRPYIAARFSVLPPTFHPGDQKQYGGFDNRGLEPGHRYVLFVLAVLQKSEPTFAASPFSDPFQLDNPDPQPIVDGEEGLIWVIGPVLAVVFIICIVIAILLYKNKPDSKRKDSEPRTKCLLNNADLAPHHPKDPVEMRRINFQTPGMLSHPPIPIADMAEHTERLKANDSLKLSQEYESIDPGQQFTWEHSNLEVNKPKNRYANVIAYDHSRVILQPIEGIMGSDYINANYVDGYRCQNAYIATQGPLPETFGDFWRMVWEQRSATIVMMTRLEEKSRIKCDQYWPNRGTETYGFIQVTLLDTIELATFCVRTFSLHKNGSSEKREVRQFQFTAWPDHGVPEYPTPFLAFLRRVKTCNPPDAGPIVVHCSAGVGRTGCFIVIDAMLERIKPEKTVDVYGHVTLMRSQRNYMVQTEDQYSFIHEALLEAVGCGNTEVPARSLYAYIQKLAQVEPGEHVTGMELEFKRLANSKAHTSRFISANLPCNKFKNRLVNIMPYESTRVCLQPIRGVEGSDYINASFIDGYRQQKAYIATQGPLAETTEDFWRMLWENNSTIVVMLTKLREMGREKCHQYWPAERSARYQYFVVDPMAEYNMPQYILREFKVTDARDGQSRTVRQFQFTDWPEQGVPKSGEGFIDFIGQVHKTKEQFGQDGPISVHCSAGVGRTGVFITLSIVLERMRYEGVVDIFQTVKMLRTQRPAMVQTEDEYQFCYQAALEYLGSFDHYAT

SEQ ID NO: 682 - protein, 616 aa, Homo sapiens
MAPRARRRRPLFALLLLCALLARLQVALQIAPPCTSEKHYEHLGRCCNKCEPGKYMSSKCTTTSDSVCLPCGPDEYLDSWNEEDKCLLHKVCDTGKALVAVVAGNSTTPRRCACTAGYHWSQDCECCRRNTECAPGLGAQHPLQLNKDTVCKPCLAGYFSDAFSSTDKCRPWTNCTFLGKRVEHHGTEKSDAVCSSSLPARKPPNEPHVYLPGLIILLLFASVALVAAIIFGVCYRKKGKALTANLWHWINEACGRLSGDKESSGDSCVSTHTANFGQQGACEGVLLLTLEEKTFPEDMCYPDQGGVCQGTCVGGGPYAQGEDARMLSLVSKTEIEEDSFRQMPTEDEYMDRPSQPTDQLLFLTEPGSKSTPPFSEPLEVGENDSLSQCFTGTQSTVGSESCNCTEPLCRTDWTPMSSENYLQKEVDSGHCPHWAASPSPNWADVCTGCRNPPGEDCEPLVGSPKRGPLPQCAYGMGLPPEEEASRTEARDQPEDGADGRLPSSARAGAGSGSSPGGQSPASGNVTGNSNSTFISSGQVMNFKGDIIVVYVSQTSQEGAAAAAEPMGRPVQEETLARRDSFAGNGPRFPDPCGGPEGLREPEKASRPVQEQGGAKA

SEQ ID NO: 683 - protein, 180 aa, Homo sapiens
MAPSSPRPALPALLVLLGALFPGPGNAQTSVSPSKVILPRGGSVLVTCSTSCDQPKLLGIETPLPKKELLLPGNNRKVYELSNVQEDSQPMCYSNCPDGQSTAKTFLTVYWTPERVEGGAPRANLTVVLLRGEKELKREPAVGEPAEVTTTVLVRRDHHGANFSCRTELDLRPQGLELFE

SEQ ID NO: 684 - protein, 740 aa, Homo sapiens
MMHLRLFCILLAAVSGAEGWGYYGCDEELVGPLYARSLGASSYYSLLTAPRFARLHGISGWSPRIGDPNPWLQIDLMKKHRIRAVATQGSFNSWDWVTRYMLLYGDRVDSWTPFYQRGHNSTFFGNVNESAVVRHDLHFHFTARYIRIVPLAWNPRGKIGLRLGLYGCPYKADILYFDGDDAISYRFPRGVSRSLWDVFAFSFKTEEKDGLLLHAEGAQGDYVTLELEGAHLLLHMSLGSSPIQPRPGHTTVSAGGVLNDQHWHYVRVDRFGRDVNFTLDGYVQRFILNGDFERLNLDTEMFIGGLVGAARKNLAYRHNFRGCIENVIFNRVNIADLAVRRHSRITFEGKVAFRCLDPVPHPINFGGPHNFVQVPGFPRRGRLAVSFRFRTWDLTGLLLFSRLGDGLGHVELTLSEGQVNVSIAQSGRKKLQFAAGYRLNDGFWHEVNFVAQENHAVISIDDVEGAEVRVSYPLLIRTGTSYFFGGCPKPASRWDCHSNQTAFHGCMELLKVDGQLVNLTLVEGRRLGFYAEVLFDTCGITDRCSPNMCEHDGRCYQSWDDFICYCELTGYKGETCHTPLYKESCEAYRLSGKTSGNFTIDPDGSGPLKPFVVYCDIRENRAWTVVRHDRLWTTRVTGSSMERPFLGAIQYWNASWEEVSALANASQHCEQWIEFSCYNSRLLNTAAFGLAEMRSSTSTGEAPSLGSSAVPVVWTGAVWTLPCTATVTLTSPSGELTRDC

SEQ ID NO: 685 - protein, 1501 aa, Homo sapiens
MAPTWGPGMVSVVGPMGLLVVLLVGGCAAEEPPRFIKEPKDQIGVSGGVASFVCQATGDPKPRVTWNKKGKKVNSQRFETIEFDESAGAVLRIQPLRTPRDENVYECVAQNSVGEITVHAKLTVLREDQLPSGFPNIDMGPQLKVVERTRTATMLCAASGNPDPEITWFKDFLPVDPSASNGRIKQLRSGALQIESSEETDQGKYECVATNSAGVRYSSPANLYVRVRRVAPRFSILPMSHEIMPGGNVNITCVAVGSPMPYVKWMQGAEDLTPEDDMPVGRNVLELTDVKDSANYTCVAMSSLGVIEAVAQITVKSLPKAPGTPMVTENTATSITITWDSGNPDPVSYYVIEYKSKSQDGPYQIKEDITTTRYSIGGLSPNSEYEIWVSAVNSIGQGPPSESVVTRTGEQAPASAPRNVQARMLSATTMIVQWEEPVEPNGLIRGYRVYYTMEPEHPVGNWQKHNVDDSLLTTVGSLLEDETYTVRVLAFTSVGDGPLSDPIQVKTQQGVPGQPMNLRAEARSETSITLSWSPPRQESIIKYELLFREGDHGREVGRTFDPTTSYVVEDLKPNTEYAFRLAARSPQGLGAFTPVVRQRTLQSISPKNFKVKMIMKTSVLLSWEFPDNYNSPTPYKIQYNGLTLDVDGRTTKKLITHLKPHTFYNFVLTNRGSSLGGLQQTVTAWTAFNLLNGKPSVAPKPDADGFIMVYLPDGQSPVPVQSYFIVMVPLRKSRGGQFLTPLGSPEDMDLEELIQDISRLQRRSLRHSRQLEVPRPYIAARFSVLPPTFHPGDQKQYGGFDNRGLEPGHRYVLFVLAVLQKSEPTFAASPFSDPFQLDNPDPQPIVDGEEGLIWVIGPVLAVVFIICIVIAILLYKNKPDSKRKDSEPRTKCLLNNADLAPHHPKDPVEMRRINFQTPGMLSHPPIPIADMAEHTERLKANDSLKLSQEYESIDPGQQFTWEHSNLEVNKPKNRYANVIAYDHSRVILQPIEGIMGSDYINANYVDGYRCQNAYIATQGPLPETFGDFWRMVWEQRSATIVMMTRLEEKSRIKCDQYWPNRGTETYGFIQVTLLDTIELATFCVRTFSLHKNGSSEKREVRQFQFTAWPDHGVPEYPTPFLAFLRRVKTCNPPDAGPIVVHCSAGVGRTGCFIVIDAMLERIKPEKTVDVYGHVTLMRSQRNYMVQTEDQYSFIHEALLEAVGCGNTEVPARSLYAYIQKLAQVEPGEHVTGMELEFKRLANSKAHTSRFISANLPCNKFKNRLVNIMPYESTRVCLQPIRGVEGSDYINASFIDGYRQQKAYIATQGPLAETTEDFWRMLWENNSTIVVMLTKLREMGREKCHQYWPAERSARYQYFVVDPMAEYNMPQYILREFKVTDARDGQSRTVRQFQFTDWPEQGVPKSGEGFIDFIGQVHKTKEQFGQDGPISVHCSAGVGRTGVFITLSIVLERMRYEGVVDIFQTVKMLRTQRPAMVQTEDEYQFCYQAALEYLGSFDHYAT

SEQ ID NO: 686 - protein, 1948 aa, Homo sapiens
MAPTWGPGMVSVVGPMGLLVVLLVGGCAAEEPPRFIKEPKDQIGVSGGVASFVCQATGDPKPRVTWNKKGKKVNSQRFETIEFDESAGAVLRIQPLRTPRDENVYECVAQNSVGEITVHAKLTVLREDQLPSGFPNIDMGPQLKVVERTRTATMLCAASGNPDPEITWFKDFLPVDPSASNGRIKQLRSETFESTPIRGALQIESSEETDQGKYECVATNSAGVRYSSPANLYVRELREVRRVAPRFSILPMSHEIMPGGNVNITCVAVGSPMPYVKWMQGAEDLTPEDDMPVGRNVLELTDVKDSANYTCVAMSSLGVIEAVAQITVKSLPKAPGTPMVTENTATSITITWDSGNPDPVSYYVIEYKSKSQDGPYQIKEDITTTRYSIGGLSPNSEYEIWVSAVNSIGQGPPSESVVTRTGEQAPASAPRNVQARMLSATTMIVQWEEPVEPNGLIRGYRVYYTMEPEHPVGNWQKHNVDDSLLTTVGSLLEDETYTVRVLAFTSVGDGPLSDPIQVKTQQGVPGQPMNLRAEARSETSITLSWSPPRQESIIKYELLFREGDHGREVGRTFDPTTSYVVEDLKPNTEYAFRLAARSPQGLGAFTPVVRQRTLQSKPSAPPQDVKCVSVRSTAILVSWRPPPPETHNGALVGYSVRYRPLGSEDPEPKEVNGIPPTTTQILLEALEKWTQYRITTVAHTEVGPGPESSPVVVRTDEDVPSAPPRKVEAEALNATAIRVLWRSPAPGRQHGQIRGYQVHYVRMEGAEARGPPRIKDVMLADAQWETDDTAEYEMVITNLQPETAYSITVAAYTMKGDGARSKPKVVVTKGAVLGRPTLSVQQTPEGSLLARWEPPAGTAEDQVLGYRLQFGREDSTPLATLEFPPSEDRYTASGVHKGATYVFRLAARSRGGLGEEAAEVLSIPEDTPRGHPQILEAAGNASAGTVLLRWLPPVPAERNGAIVKYTVAVREAGALGPARETELPAAAEPGAENALTLQGLKPDTAYDLQVRAHTRRGPGPFSPPVRYRTFLRDQVSPKNFKVKMIMKTSVLLSWEFPDNYNSPTPYKIQYNGLTLDVDGRTTKKLITHLKPHTFYNFVLTNRGSSLGGLQQTVTAWTAFNLLNGKPSVAPKPDADGFIMVYLPDGQSPVPVQSYFIVMVPLRKSRGGQFLTPLGSPEDMDLEELIQDISRLQRRSLRHSRQLEVPRPYIAARFSVLPPTFHPGDQKQYGGFDNRGLEPGHRYVLFVLAVLQKSEPTFAASPFSDPFQLDNPDPQPIVDGEEGLIWVIGPVLAVVFIICIVIAILLYKNKPDSKRKDSEPRTKCLLNNADLAPHHPKDPVEMRRINFQTPDSGLRSPLREPGFHFESMLSHPPIPIADMAEHTERLKANDSLKLSQEYESIDPGQQFTWEHSNLEVNKPKNRYANVIAYDHSRVILQPIEGIMGSDYINANYVDGYRCQNAYIATQGPLPETFGDFWRMVWEQRSATIVMMTRLEEKSRIKCDQYWPNRGTETYGFIQVTLLDTIELATFCVRTFSLHKNGSSEKREVRQFQFTAWPDHGVPEYPTPFLAFLRRVKTCNPPDAGPIVVHCSAGVGRTGCFIVIDAMLERIKPEKTVDVYGHVTLMRSQRNYMVQTEDQYSFIHEALLEAVGCGNTEVPARSLYAYIQKLAQVEPGEHVTGMELEFKRLANSKAHTSRFISANLPCNKFKNRLVNIMPYESTRVCLQPIRGVEGSDYINASFIDGYRQQKAYIATQGPLAETTEDFWRMLWENNSTIVVMLTKLREMGREKCHQYWPAERSARYQYFVVDPMAEYNMPQYILREFKVTDARDGQSRTVRQFQFTDWPEQGVPKSGEGFIDFIGQVHKTKEQFGQDGPISVHCSAGVGRTGVFITLSIVLERMRYEGVVDIFQTVKMLRTQRPAMVQTEDEYQFCYQAALEYLGSFDHYAT

SEQ ID NO: 687 - protein, 260 aa, Homo sapiens
MHSWERLAVLVLLGAAACGEEAWAWAAPPRGRILGGREAEAHARPYMASVQLNGAHLCGGVLVAEQWVLSAAHCLEDAADGKVQVLLGAHSLSQPEPSKRLYDVLRAVPHPDSQPDTIDHDLLLLQLSEKATLGPAVRPLPWQRVDRDVAPGTLCDVAGWGIVNHAGRRPDSLQHVLLPVLDRATCNRRTHHDGAITERLMCAESNRRDSCKGDSGGPLVCGGVLEGVVTSGSRVCGNRKKPGIYTRVASYAAWIDSVLA

SEQ ID NO: 688 - protein, 132 aa, Homo sapiens
MGPGRCLLTALLLLALAPPPEASQYCGRLEYWNPDNKCCSSCLQRFGPPPCPDYEFRENCGLNDHGDFVTPPFRKCSSGQCNPDGAELCSPCGGGAVTPTPAAGGGRTPWRCREAGPCQGALPPHTWKPRRP

SEQ ID NO: 689 - protein, 138 aa, Homo sapiens
MGPGRCLLTALLLLALAPPPEASQYCGRLEYWNPDNKCCSSCLQRFGPPPCPDYEFRENCGLNDHGDFVTPPFRKCSSGQCNPDGAELCSPCGGGAVTPTPAAGGGRTPWRCRERPVPAKGHCPLTPGNPGAPSSQER

SEQ ID NO: 690 - protein, 681 aa, Homo sapiens
MGGRVFLVFLAFCVWLTLPGAETQDSRGCARWCPQDSSCVNATACRCNPGFSSFSEIITTPMETCDDINECATLSKVSCGKFSDCWNTEGSYDCVCSPGYEPVSGAKTFKNESENTCQDMTFSTWTPPPGVHSQTLSRFFDKVQDLGRDYKPGLANNTIQSILQALDELLEAPGDLETLPRLQQHCVASHLLDGLEDVLRGLSKNLSNGLLNFSYPAGTELSLEVQKQVDRSVTLRQNQAVMQLDWNQAQKSGDPGPSVVGLVSIPGMGKLLAEAPLVLEPEKQMLLHETHQGLLQDGSPILLSDVISAFLSNNDTQNLSSPVTFTFSHRSVIPRQKVLCVFWEHGQNGCGHWATTGCSTIGTRDTSTICRCTHLSSFAVLMAHYDVQEEDPVLTVITYMGLSVSLLCLLLAALTFLLCKAIQNTSTSLHLQLSLCLFLAHLLFLVAIDQTGHKVLCSIIAGTLHYLYLATLTWMLLEALYLFLTARNLTVVNYSSINRFMKKLMFPVGYGVPAVTVAISAASRPHLYGTPSRCWLQPEKGFIWGFLGPVCAIFSVNLVLFLVTLWILKNRLSSLNSEVSTLRNTRMLAFKATAQLFILGCTWCLGILQVGPAARVMAYLFTIINSLQGVFIFLVYCLLSQQVREQYGKWSKGIRKLKTESEMHTLSSSAKADTSKPSTVN

SEQ ID NO: 691 - protein, 71 aa, Homo sapiens
MAPLALHLLVLVPILLSLVASQDWKAERSQDPFEKCMQDPDYEQLLKVVTWGLNRTLKPQRVIVVGAGVAG

SEQ ID NO: 692 - protein, 167 aa, Homo sapiens
MGVPRPQPWALGLLLFLLPGSLGAESHLSLLYHLTAVSSPAPGTPAFWVSGWLGPQQYLSYNSLRGEAEPCGAWVWENQVSWYWEKETTDLRIKEKLFLEAFKALGGKGPYTLQGLLGCELGPDNTSVPTAKFALNGEEFMNFDLKQGTWGGDWPEALAISQRWQQQ

SEQ ID NO: 693 - protein, 225 aa, Homo sapiens
MGVPRPQPWALGLLLFLLPGSLGAESHLSLLYHLTAVSSPAPGTPAFWVSGWLGPQQYLSYNSLRGEAEPCGAWVWENQVSWYWEKETTDLRIKEKLFLEAFKALGGKGPYTLQGLLGCELGPDNTSVPTAKFALNGEEFMNFDLKQGTWGGDWPEALAISQRWQQQDKAANKELTFLLFSCPHRLREHLERGRGNLEWKDTVSHYVAQAGLELLGSSDSPALVS

SEQ ID NO: 694 - protein, 150 aa, Homo sapiens
MAPLALHLLVLVPILLSLVASQDWKAERSQDPFEKCMQDPDYEQLLKVTILEADNRIGGRIFTYRDQNTGWIGELGAMRMPSSHRILHKLCQGLGLNLTKFTQYDKNTWTEVHEVKLRNYVVEKVPEKLGYALRPQEKGHSPEDIYQMAL

SEQ ID NO: 695 - protein, 278 aa, Homo sapiens
MGSPGMVLGLLVQIWALQEASSLSVQQGPNLLQVRQGSQATLVCQVDQATAWERLRVKWTKDGAILCQPYITNGSLSLGVCGPQGRLSWQAPSHLTLQLDPVSLNHSGAYVCWAAVEIPELEEAEGNITRLFVDPDDPTQNRNRIASFPGFLFVLLGVGSMGVAAIVWGAWFWGRRSCQQRDSGNAFYSNVLYRPRGAPKKSEDCSGEGKDQRGQSIYSTSFPQPAPRQPHLASRPCPSPRPCPSPRPGHPVSMVRVSPRPSPTQQPRPKGFPKVGEE

SEQ ID NO: 696 - protein, 774 aa, Homo sapiens
MGGRVFLVFLAFCVWLTLPGAETQDSRGCARWCPQDSSCVNATACRCNPGFSSFSEIITTPMETCDDINECATLSKVSCGKFSDCWNTEGSYDCVCSPGYEPVSGAKTFKNESENTCQDVDECQQNPRLCKSYGTCVNTLGSYTCQCLPGFKLKPEDPKLCTDVDECSSGQHQCDSSTVCFNTVGSYSCRCRPGWKPRHGIPNNQKDTVCEDMTFSTWTPPPGVHSQTLSRFFDKVQDLGRDYKPGLANNTIQSILQALDELLEAPGDLETLPRLQQHCVASHLLDGLEDVLRGLSKNLSNGLLNFSYPAGTELSLEVQKQVDRSVTLRQNQAVMQLDWNQAQKSGDPGPSVVGLVSIPGMGKLLAEAPLVLEPEKQMLLHETHQGLLQDGSPILLSDVISAFLSNNDTQNLSSPVTFTFSHRSVIPRQKVLCVFWEHGQNGCGHWATTGCSTIGTRDTSTICRCTHLSSFAVLMAHYDVQEEDPVLTVITYMGLSVSLLCLLLAALTFLLCKAIQNTSTSLHLQLSLCLFLAHLLFLVAIDQTGHKVLCSIIAGTLHYLYLATLTWMLLEALYLFLTARNLTVVNYSSINRFMKKLMFPVGYGVPAVTVAISAASRPHLYGTPSRCWLQPEKGFIWGFLGPVCAIFSVNLVLFLVTLWILKNRLSSLNSEVSTLRNTRMLAFKATAQLFILGCTWCLGILQVGPAARVMAYLFTIINSLQGVFIFLVYCLLSQQVREQYGKWSKGIRKLKTESEMHTLSSSAKADTSKPSTVN

SEQ ID NO: 697 - protein, 273 aa, Homo sapiens
MGVPRPQPWALGLLLFLLPGSLGAESHLSLLYHLTAVSSPAPGTPAFWVSGWLGPQQYLSYNSLRGEAEPCGAWVWENQVSWYWEKETTDLRIKEKLFLEAFKALGGKEPPSMRLKARPSSPGFSVLTCSAFSFYPPELQLRFLRNGLAAGTGQGDFGPNSDGSFHASSSLTVKSGDEHHYCCIVQHAGLAQPLRVELESPAKSSVLVVGIVIGVLLLTAAAVGGALLWRRMRSGLPAPWISLRGDDTGVLLPTPGEAQDADLKDVNVIPATA

SEQ ID NO: 698 - protein, 831 aa, Homo sapiens
MGGRVFLVFLAFCVWLTLPGAETQDSRGCARWCPQDSSCVNATACRCNPGFSSFSEIITTPMETCDDINECATLSKVSCGKFSDCWNTEGSYDCVCSPGYEPVSGAKTFKNESENTCQDVDECQQNPRLCKSYGTCVNTLGSYTCQCLPGFKLKPEDPKLCTDVNECTSGQNPCHSSTHCLNNVGSYQCRCRPGWQPIPGSPNGPNNTVCEDVDECSSGQHQCDSSTVCFNTVGSYSCRCRPGWKPRHGIPNNQKDTVCEDMTFSTWTPPPGVHSQTLSRFFDKVQDLGRDYKPGLANNTIQSILQALDELLEAPGDLETLPRLQQHCVASHLLDGLEDVLRGLSKNLSNGLLNFSYPAGTELSLEVQKQVDRSVTLRQNQAVMQLDWNQAQKSGDPGMGKLLAEAPLVLEPEKQMLLHETHQGLLQDGSPILLSDVISAFLSNNDTQNLSSPVTFTFSHRSVIPRQKVLCVFWEHGQNGCGHWATTGCSTIGTRDTSTICRCTHLSSFAVLMAHYDVQEEDPVLTVITYMGLSVSLLCLLLAALTFLLCKAIQNTSTSLHLQLSLCLFLAHLLFLVAIDQTGHKVLCSIIAGTLHYLYLATLTWMLLEALYLFLTARNLTVVNYSSINRFMKKLMFPVGYGVPAVTVAISAASRPHLYGTPSRCWLQPEKGFIWGFLGPVCAIFSVNLVLFLVTLWILKNRLSSLNSEVSTLRNTRMLAFKATAQLFILGCTWCLGILQVGPAARVMAYLFTIINSLQGVFIFLVYCLLSQQVREQYGKWSKGIRKLKTESEMHTLSSSAKADTSKPSTPGTVVQACNASTLGGQSRKIT

SEQ ID NO: 699 - protein, 29 aa, Homo sapiens
MNILGLVVFAIVFGVALRKLGPEGELLIR

SEQ ID NO: 700 - protein, 303 aa, Homo sapiens
MSSTLPALLCVGLCLSQRISAQQQTLPKPFIWAEPHFMVPKEKQVTICCQGNYGAVEYQLHFEGSLFAVDRPKPPERINKVQFYIPDMNSRMAGQYSCIYRVGELWSEPSNLLDLVVTEMYDTPTLSVHPGPEVISGEKVTFYCRLDTATSMFLLLKEGRSSHVQRGYGKVQAEFPLGPVTTAHRGTYRCFGSYNNHAWSFPSEPVKLLVTGDIENTSLAPEDPTFPDTWGTYLLTTETGLQKDHALWDHTAQNLLRMGLAFLVLVALVWFLVEDWLSRKRTRERASRASTWEGRRRLNTQTL

SEQ ID NO: 701 - protein, 812 aa, Homo sapiens
MGGRVFLVFLAFCVWLTLPGAETQDSRGCARWCPQDSSCVNATACRCNPGFSSFSEIITTPMETCDDINECATLSKVSCGKFSDCWNTEGSYDCVCSPGYEPVSGAKTFKNESENTCQDVDECQQNPRLCKSYGTCVNTLGSYTCQCLPGFKLKPEDPKLCTDVNECTSGQNPCHSSTHCLNNVGSYQCRCRPGWQPIPGSPNGPNNTVCEDVDECSSGQHQCDSSTVCFNTVGSYSCRCRPGWKPRHGIPNNQKDTVCEDMTFSTWTPPPGVHSQTLSRFFDKVQDLGRDYKPGLANNTIQSILQALDELLEAPGDLETLPRLQQHCVASHLLDGLEDVLRGLSKNLSNGLLNFSYPAGTELSLEVQKQVDRSVTLRQNQAVMQLDWNQAQKSGDPGMGKLLAEAPLVLEPEKQMLLHETHQGLLQDGSPILLSDVISAFLSNNDTQNLSSPVTFTFSHRSVIPRQKVLCVFWEHGQNGCGHWATTGCSTIGTRDTSTICRCTHLSSFAVLMAHYDVQEEDPVLTVITYMGLSVSLLCLLLAALTFLLCKAIQNTSTSLHLQLSLCLFLAHLLFLVAIDQTGHKVLCSIIAGTLHYLYLATLTWMLLEALYLFLTARNLTVVNYSSINRFMKKLMFPVGYGVPAVTVAISAASRPHLYGTPSRCWLQPEKGFIWGFLGPVCAIFSVNLVLFLVTLWILKNRLSSLNSEVSTLRNTRMLAFKATAQLFILGCTWCLGILQVGPAARVMAYLFTIINSLQGVFIFLVYCLLSQQVREQYGKWSKGIRKLKTESEMHTLSSSAKADTSKPSTVN

SEQ ID NO: 702 - protein, 141 aa, Homo sapiens
MGVPRPQPWALGLLLFLLPGSLGAESHLSLLYHLTAVSSPAPGTPAFWVSGWLGPQQYLSYNSLRGEAEPCGAWVWENQVSWYWEKETTDLRIKEKLFLEAFKALGGKGPYTLQGLLGCELGPDNTSVPTAKFALNGEEFM

SEQ ID NO: 703 - protein, 211 aa, Homo sapiens
GVPRPQPWALGLLLFLLPGSLGAESHLSLLYHLTAVSSPAPGTPAFWVSGWLGPQQYLSYNSLRGEAEPCGAWVWENQVSWYWEKETTDLRIKEKLFLEAFKALGGKGPYTLQGLLGCELGPDNTSVPTAKFALNGEEFMNFDLKQGTWGGDWPEALAISQRWQQQDKAANKELTFLLFSCPHRLREHLERGRGNLEWKEPKARQIFCAWI

SEQ ID NO: 704 - protein, 730 aa, Homo sapiens
MGGRVFLVFLAFCVWLTLPGAETQDSRGCARWCPQDSSCVNATACRCNPGFSSFSEIITTPMETCDDINECATLSKVSCGKFSDCWNTEGSYDCVCSPGYEPVSGAKTFKNESENTCQDVDECSSGQHQCDSSTVCFNTVGSYSCRCRPGWKPRHGIPNNQKDTVCEDMTFSTWTPPPGVHSQTLSRFFDKVQDLGRDYKPGLANNTIQSILQALDELLEAPGDLETLPRLQQHCVASHLLDGLEDVLRGLSKNLSNGLLNFSYPAGTELSLEVQKQVDRSVTLRQNQAVMQLDWNQAQKSGDPGPSVVGLVSIPGMGKLLAEAPLVLEPEKQMLLHETHQGLLQDGSPILLSDVISAFLSNNDTQNLSSPVTFTFSHRSVIPRQKVLCVFWEHGQNGCGHWATTGCSTIGTRDTSTICRCTHLSSFAVLMAHYDVQEEDPVLTVITYMGLSVSLLCLLLAALTFLLCKAIQNTSTSLHLQLSLCLFLAHLLFLVAIDQTGHKVLCSIIAGTLHYLYLATLTWMLLEALYLFLTARNLTVVNYSSINRFMKKLMFPVGYGVPAVTVAISAASRPHLYGTPSRCWLQPEKGFIWGFLGPVCAIFSVNLVLFLVTLWILKNRLSSLNSEVSTLRNTRMLAFKATAQLFILGCTWCLGILQVGPAARVMAYLFTIINSLQGVFIFLVYCLLSQQVREQYGKWSKGIRKLKTESEMHTLSSSAKADTSKPSTVN

SEQ ID NO: 705 - protein, 32 aa, Homo sapiens
MAPLALHLLVLVPILLSLVASQDWKAERSQDP

SEQ ID NO: 706 - protein, 256 aa, Homo sapiens
MLLWLLLLILTPGREQSGVAPKAVLLLNPPWSTAFKGEKVALICSSISHSLAQGDTYWYHDEKLLKIKHDKIQITEPGNYQCKTRGSSLSDAVHVEFSPDWLILQALHPVFEGDNVILRCQGKDNKNTHQKVYYKDGKQLPNSYNLEKITVNSVSRDNSKYHCTAYRKFYILDIEVTSKPLNIQVQELFLHPVLRASSSTPIEGSPMTLTCETQLSPQRPDVQLQFSLFRDSQTLGLGWSRSPRLQIPAMWTEDSG

SEQ ID NO: 707 - protein, 520 aa, Homo sapiens
MVARVGLLLRALQLLLWGHLDAQPAERGGQELRKEAEAFLEKYGYLNEQVPKAPTSTRFSDAIRAFQWVSQLPVSGVLDRATLRQMTRPRCGVTDTNSYAAWAERISDLFARHRTKMRRKKRFAKQGNKWYKQHLSYRLVNWPEHLPEPAVRGAVRAAFQLWSNVSALEFWEAPATGPADIRLTFFQGDHNDGLGNAFDGPGGALAHAFLPRRGEAHFDQDERWSLSRRRGRNLFVVLAHEIGHTLGLTHSPAPRALMAPYYKRLGRDALLSWDDVLAVQSLYGKPLGGSVAVQLPGKLFTDFETWDSYSPQGRRPETQGPKYCHSSFDAITVDRQQQLYIFKGSHFWEVAADGNVSEPRPLQERWVGLPPNIEAAAVSLNDGDFYFFKGGRCWRFRGPKPVWGLPQLCRAGGLPRHPDAALFFPPLRRLILFKGARYYVLARGGLQVEPYYPRSLQDWGGIPEEVSGALPRPDGSIIFFRDDRYWRLDQAKLQATTSGRWATELPWMGCWHANSGSALF

SEQ ID NO: 708 - protein, 62 aa, Homo sapiens
MPFSHLSTYSLVWVMAAVVLCTAQVQVVTQDEREQLYTPASLKCSLQNAQEALIVTWQKKKA

SEQ ID NO: 709 - protein, 115 aa, Homo sapiens
MVSRLLSLVSLCLLGAKHIEAGVTQFPSHSVIEKGQTVTLRCDPISGHDNLYWYRRVMGKEIKFLLHFVKESKQDESGMPNNRFLAERTGGTYSTLKVQPAELEDSGVYFCASSQ

SEQ ID NO: 710 - protein, 352 aa, Homo sapiens
MLAVGCALLAALLAAPGAALAPRRCPAQEVARGVLTSLPGDSVTLTCPGVEPEDNATVHWVLRKPAAGSHPSRWAGMGRRLLLRSVQLHDSGNYSCYRAGRPAGTVHLLVDVPPEEPQLSCFRKSPLSNVVCEWGPRSTPSLTTKAVLLVRKFQNSPAEDFQEPCQYSQESQKFSCQLAVPEGDSSFYIVSMCVASSVGSKFSKTQTFQGCGILQPDPPANITVTAVARNPRWLSVTWQDPHSWNSSFYRLRFELRYRAERSKTFTTWMVKDLQHHCVIHDAWSGLRHVVQLRAQEEFGQGEWSEWSPEAMGTPWTDRLSPRCPGWSTAVQSQLTATSASWVQAILPPQPPK

SEQ ID NO: 711 - protein, 270 aa, Homo sapiens
MQRARPTLWAAALTLLVRCEPCDARALAQCAPPPAVCAELVREPGCGCCLTCALSEGQPCGIYTERCGSGLRCQPSPDEARPLQALLDGRGLCVNASAVSRLRAYLLPAPPAPGNASESEEDRSAGSVESPSVSSTHRVSDPKFHPLHSKIIIIKKGHAKDSQRYKVDYESQSTDTQNFSSESKRETEYGPCRREMEDTLNHLKFLNVLSPRGVHIPNCDKKGFYKKKQCRPSKGRKRGFCWCVDKYGQPLPGYTTKGKEDVHCYSMQSK

SEQ ID NO: 712 - protein, 761 aa, Homo sapiens [sequence omitted]

SEQ ID NO: 713 - protein, 848 aa, Homo sapiens [sequence omitted]

SEQ ID NO: 714 - protein, 92 aa, Homo sapiens
MQVSTAALAVLLCTMALCNQFSASLAADTPTACCFSYTSRQIPQNFIADYFETSSQCSKPGVIFLTKRSRQVCADPSEEWVQKYVSDLELSA

SEQ ID NO: 715 - protein, 212 aa, Homo sapiens
MATLSFVFLLLGAVSWPPASASGQEFWPGQSAADILSGAASRRRYLLYDVNPPEGFNLRRDVYIRIASLLKTLLKTEEWVLVLPPWGRLYHWQSPDIHQVRIPWSEFFDLPSLNKNIPVIEYEQFIAGRRTACGVCFVVSQCSARDKESGGPFIDQVYVLQSYAEGWKEGTWEEKVDERPCIDQLLYSQDKHEYYRCLLRLLPLPQRMVLGL

SEQ ID NO: 716 - protein, 884 aa, Homo sapiens [sequence omitted]

SEQ ID NO: 717 - protein, 114 aa, Homo sapiens
MGTRLFFYVALCLLWTGHMDAGITQSPRHKVTETGTPVTLRCHQTENHRYMYWYRQDPGHGLRLIHYSYGVKDTDKGEVSDGYSVSRSKTEDFLLTLESATSSQTSVYFCAISE

SEQ ID NO: 718 - protein, 87 aa, Homo sapiens
MKLCVTVLSLLVLVAAFCSLALSAPMGSDPPTACCFSYTARKLPRNFVVDYYETSSLCSQPAVVGKQVCADPSESWVQEYVYDLELN

SEQ ID NO: 719 - protein, 115 aa, Homo sapiens
MATRLLCCVVLCLLGEELIDARVTQTPRHKVTEMGQEVTMRCQPILGHNTVFWYRQTMMQGLELLAYFRNRAPLDDSGMPKDRFSAEMPDATLATLKIQPSEPRDSAVYFCASGL

SEQ ID NO: 720 - protein, 263 aa, Homo sapiens
MAPRARRRRPLFALLLLCALLARLQVALQIAPPCTSEKHYEHLGRCCNKCEPGKYMSSKCTTTSDSVCLPCGPDEYLDSWNEEDKCLLHKVCDTGKALVAVVAGNSTTPRRCACTAGYHWSQDCECCRRNTECAPGLGAQHPLQLNKDTVCKPCLAGYFSDAFSSTDKCRPWTNCTFLGKRVEHHGTEKSDAVCSSSLPARKPPNEPHVYLPGLIILLLFASVALVAAIIFGVCYRKKGKALTANLWHWINEACGRLSGDKEM

SEQ ID NO: 721 - protein, 152 aa, Homo sapiens
MQPILLLLAFLLLPRADQLERKAKRTRAVQPLRLPSNKAQVKPGQTCSVAGWGQTAPLGKHSHTLQEVKMTVQEDRKCESDLRHYYDSTIELCVGDPEIKKTSFKGDSGGPLVCNKVAQGIVSYGRNNGMPPRACTKVSSFVHWIKKTMKRY

SEQ ID NO: 722 - protein, 103 aa, Homo sapiens
MKLCVTVLSLLVLVAAFCSLALSAPMGSDPPTACCFSYTARKLPRNFVVDYYETSSLCSQPAVVYRESASSAAPGRIPSTRAAPHGPWSGRGRCLPQARDKAR

SEQ ID NO: 723 - protein, 144 aa, Homo sapiens
MALLLTTVIALTCLGGFASPGPVPPSTALRELIEELVNITQNQKAPLCNGSMVWSINLTAGMYCAALESLINVSGCSAIEKTQRMLSGFCPHKVSAGQFSSLHVRDTKIEVAQFVKDLLLHLKKLFREGQFNNFESIIICRDRT

SEQ ID NO: 724 - protein, 64 aa, Homo sapiens
MKLCVTVLSLLVLVAAFCSLALSAPMGSDPPTACCFSYTARKLPRNFVVDYYETSSLCSQPAVV

SEQ ID NO: 725 - protein, 884 aa, Homo sapiens
MLQTKDLIWTLFFLGTAVSLQVDIVPSQGEISVGESKFFLCQVAGDAKDKDISWFSPNGEKLTPNQQRISVVWNDDSSSTLTIYNANIDDAGIYKCVVTGEDGSESEATVNVKIFQKLMFKNAPTPQEFREGEDAVIVCDVVSSLPPTIIWKHKGRDVILKKDVRFIVLSNNYLQIRGIKKTDEGTYRCEGRILARGEINFKDIQVIVNVPPTIQARQNIVNATANLGQSVTLVCDAEGFPEPTMSWTKDGEQIEQEEDDEKYIFSDDSSQLTIKKVDKNDEAEYICIAENKAGEQDATIHLKVFAKPKITYVENQTAMELEEQVTLTCEASGDPIPSITWRTSTRNISSEEKASWTRPEKQEVHAPWNWQVGRQKGQAGSAGFPGSHETLDGHMVVRSHARVSSLTLKSIQYTDAGEYICTASNTIGQDSQSMYLEVQYAPKLQGPVAVYTWEGNQVNITCEVFAYPSATISWFRDGQLLPSSNYSNIKIYNTPSASYLEVTPDSENDFGNYNCTAVNRIGQESLEFILVQADTPSSPSIDQVEPYSSTAQVQFDEPEATGGVPILKYKAEWRAVGEEVWHSKWYDAKEASMEGIVTIVGLKPETTYAVRLAALNGKGLGEISAASEFKTQPVQGEPSAPKLEGQMGEDGNSIKVNLIKQDDGGSPIRHYLVRYRALSSEWKPEIRLPSGSDHVMLKSLDWNAEYEVYVVAENQQGKSKAAHFVFRTSAQPTAIPANGSPTSGLSTGAIVGILIVIFVLLLVVVDITCYFLNKCGLFMCIAVNLCGKAGPGAKGKDMEEGKAAFSKDESKEPIVEVRTEEERTPNHDGGKHTEPNETTPLTEPEKGPVEAKPECQETETKPAPAEVKTVPNDATQTKENESKA

SEQ ID NO: 726 - protein, 144 aa, Homo sapiens
MSLLLPPLALLLLLAALVAPATAATAYRPDWNRLSGLTRARVETCGGQLNRLKEVKAFVTQDIPFYHNLVMKHLPGADPELVLLGRRYEELERIPLSEMTREEINALVQELGFYRKAAPDAQVPPEYVWAPAKPPEETSDHADL

SEQ ID NO: 727 - protein, 93 aa, Homo sapiens
MQVSTAALAVLLCTMALCNQVLSAPLAADTPTACCFSYTSRQIPQNFIADYFETSSQCSKPSVIFLTKRGRQVCADPSEEWVQKYVSDLELSA

SEQ ID NO: 728 - protein, 52 aa, Homo sapiens
MKLCVTVLSLLMLVAAFCSPALSAPNSKPKEASKSVLIPVNPGSRSTCMTWN

SEQ ID NO: 729 - protein, 136 aa, Homo sapiens
MGLTSQLLPPLFFLLACAGNFVHGHKCDITLQEIIKTLNSLTEQKTLCTELTVTDIFAASKQHACLPTSRHTGTICRPPSARVPSTSTRLQSPERTQLRRKPSAGLRLCSGSSTATMRRTLAAWVRLHSSSTGTSS

SEQ ID NO: 730 - protein, 761 aa, Homo sapiens
MLQTKDLIWTLFFLGTAVSLQVDIVPSQGEISVGESKFFLCQVAGDAKDKDISWFSPNGEKLTPNQQRISVVWNDDSSSTLTIYNANIDDAGIYKCVVTGEDGSESEATVNVKIFQKLMFKNAPTPQEFREGEDAVIVCDVVSSLPPTIIWKHKGRDVILKKDVRFIVLSNNYLQIRGIKKTDEGTYRCEGRILARGEINFKDIQVIVNVPPTIQARQNIVNATANLGQSVTLVCDAEGFPEPTMSWTKDGEQIEQEEDDEKYIFSDDSSQLTIKKVDKNDEAEYICIAENKAGEQDATIHLKVFAKPKITYVENQTAMELEEQVTLTCEASGDPIPSITWRTSTRNISSEEKTLDGHMVVRSHARVSSLTLKSIQYTDAGEYICTASNTIGQDSQSMYLEVQYAPKLQGPVAVYTWEGNQVNITCEVFAYPSATISWFRDGQLLPSSNYSNIKIYNTPSASYLEVTPDSENDFGNYNCTAVNRIGQESLEFILVQADTPSSPSIDQVEPYSSTAQVQFDEPEATGGVPILKYKAEWRAVGEEVWHSKWYDAKEASMEGIVTIVGLKPETTYAVRLAALNGKGLGEISAASEFKTQPVHSPPPPASASSSTPVPLSPPDTTWPLPALATTEPAKGEPSAPKLEGQMGEDGNSIKVNLIKQDDGGSPIRHYLVRYRALSSEWKPEIRLPSGSDHVMLKSLDWNAEYEVYVVAENQQGKSKAAHFVFRTSAQPTAIPATLGGNSASYTFVSLLFSAVTLLLLC

SEQ ID NO: 731 - protein, 858 aa, Homo sapiens [sequence omitted]

SEQ ID NO: 732 - protein, 3121 aa, Homo sapiens
MPGAAGVLLLLLLSGGLGGVQAQRPQQQRQSQAHQQRGLFPAVLNLASNALITTNATCGEKGPEMYCKLVEHVPGQPVRNPQCRICNQNSSNPNQRHPITNAIDGKNTWWQSPSIKNGIEYHYVTITLDLQQVFQIAYVIVKAANSPRPGNWILERSLDDVEYKPWQYHAVTDTECLTLYNIYPRTGPPSYAKDDEVICTSFYSKIHPLENGEIHISLINGRPSADDPSPELLEFTSARYIRLRFQRIRTLNADLMMFAHKDPREIDPIVTRRYYYSVKDISVGGMCICYGHARACPLDPATNKSRCECEHNTCGDSCDQCCPGFHQKPWRAGTFLTKTECEACNCHGKAEECYYDENVARRNLSLNIRGKYIGGGVCINCTQNTAGINCETCTDGFFRPKGVSPNYPRPCQPCHCDPIGSLNEVCVKDEKHARRGLAPGSCHCKTGFGGVSCDRCARGYTGYPDCKACNCSGLGSKNEDPCFGPCICKENVEGGDCSRCKSGFFNLQEDNWKGCDECFCSGVSNRCQSSYWTYGKIQDMSGWYLTDLPGRIRVAPQQDDLDSPQQISISNAEARQALPHSYYWSAPAPYLGNKLPAVGGQLTFTISYDLEEEEEDTERVLQLMIILEGNDLSISTAQDEVYLHPSEEHTNVLLLKEESFTIHGTHFPVRRKEFMTVLANLKRVLLQITYSFGMDAIFRLSSVNLESAVSYPTDGSIAAAVEVCQCPPGYTGSSCESCWPRHRRVNGTIFGGICEPCQCFGHAESCDDVTGECLNCKDHTGGPYCDKCLPGFYGEPTKGTSEDCQPCACPLNIPSNNFSPTCHLDRSLGLICDGCPVGYTGPRCERCAEGYFGQPSVPGGSCQPCQCNDNLDFSIPGSCDSLSGSCLICKPGTTGRYCELCADGYFGDAVDAKNCQPCRCNAGGSFSEVCHSQTGQCECRANVQGQRCDKCKAGTFGLQSARGCVPCNCNSFGSKSFDCEESGQCWCQPGVTGKKCDRCAHGYFNFQEGGCTACECSHLGNNCDPKTGRCICPPNTIGEKCSKCAPNTWGHSITTGCKACNCSTVGSLDFQCNVNTGQCNCHPKFSGAKCTECSRGHWNYPRCNLCDCFLPGTDATTCDSETKKCSCSDQTGQCTCKVNVEGIHCDRCRPGKFGLDAKNPLGCSSCYCFGTTTQCSEAKGLIRTWVTLKAEQTILPLVDEALQHTTTKGIVFQHPEIVAHMDLMREDLHLEPFYWKLPEQFEGKKLMAYGGKLKYAIYFEAREETGFSTYNPQVIIRGGTPTHARIIVRHMAAPLIGQLTRHEIEMTEKEWKYYGDDPRVHRTVTREDFLDILYDIHYILIKATYGNFMRQSRISEISMEVAEQGRGTTMTPPADLIEKCDCPLGYSGLSCEACLPGFYRLRSQPGGRTPGPTLGTCVPCQCNGHSSLCDPETSICQNCQHHTAGDFCERCALGYYGIVKGLPNDCQQCACPLISSSNNFSPSCVAEGLDDYRCTACPRGYEGQYCERCAPGYTGSPGNPGGSCQECECDPYGSLPVPCDPVTGFCTCRPGATGRKCDGCKHWHAREGWECVFCGDECTGLLLGDLARLEQMVMSINLTGPLPAPYKMLYGLENMTQELKHLLSPQRAPERLIQLAEGNLNTLVTEMNELLTRATKVTADGEQTGQDAERTNTRAKSLGEFIKELARDAEAVNEKAIKLNETLGTRDEAFERNLEGLQKEIDQMIKELRRKNLETQKEIAEDELVAAEALLKKVKKLFGESRGENEEMEKDLREKLADYKNKVDDAWDLLREATDKIREANRLFAVNQKNMTALEKKKEAVESGKRQIENTLKEGNDILDEANRLADEINSIIDYVEDIQTKLPPMSEELNDKIDDLSQEIKDRKLAEKVSQAESHAAQLNDSSAVLDGILDEAKNISFNATAAFKAYSNIKDYIDEAEKVAKEAKDLAHEATKLATGPRGLLKEDAKGCLQKSFRILNEAKKLANDVKENEDHLNGLKTRIENADARNGDLLRTLNDTLGKLSAIPNDTAAKLQAVKDKARQANDTAKDVLAQITELHQNLDGLKKNYNKLADSVAKTNAVVKDPSKNTVADADATVKNLEQEADRLIDKLKPIKELEDNLKKNISEIKELINQARKQANSIKVSVSSGGDCIRTYKPEIKKGSYNNIVVNVKTAVADNLLFYLGSAKFIDFLAIEMRKGKVSFLWDVGSGVGRVEYPDLTIDDSYWYRIVASRTGRNGTISVRALDGPKASIVPSTHHSTSPPGYTILDVDANAMLFVGGLTGKLKKADAVRVITFTGCMGETYFDNKPIGLWNFREKEGDCKGCTVSPQVEDSEGTIQFDGEGYALVSRPIRWYPNISTVMFKFRTFSSSALLMYLATRDLRDFMSVELTDGHIKVSYDLGSGMASVVSNQNHNDGKWKSFTLSRIQKQANISIVDIDTNQEENIATSSSGNNFGLDLKADDKIYFGGLPTLRNLSMKARPEVNLKKYSGCLKDIEISRTPYNILSSPDYVGVTKGCSLENVYTVSFPKPGFVELSPVPIDVGTEINLSFSTKNESGIILLGSGGTPAPPRRKRRQTGQAYYAILLNRGRLEVHLSTGARTMRKIVIRPEPNLFHDGREHSVHVERTRGIFTVQVDENRRYMQNLTVEQPIEVKKLFVGGAPPEFQPSPLRNIPPFEGCIWNLVINSVPMDFARPVSFKNADIGRCAHQKLREDEDGAAPAEIVIQPEPVPTPAFPTPTPVLTHGPCAAESEPALLIGSKQFGLSRNSHIAIAFDDTKVKNRLTIELEVRTEAESGLLFYMARINHADFATVQLRNGLPYFSYDLGSGDTHTMIPTKINDGQWHKIKIMRSKQEGILYVDGASNRTISPKKADILDVVGMLYVGGLPINYTTRRIGPVTYSIDGCVRNLHMAEAPADLEQPTSSFHVGTCFANAQRGTYFDGTGFAKAVGGFKVGLDLLVEFEFRTTTTTGVLLGISSQKMDGMGIEMIDEKLMFHVDNGAGRFTAVYDAGVPGHLCDGQWHKVTANKIKHRIELTVDGNQVEAQSPNPASTSADTNDPVFVGGFPDDLKQFGLTTSIPFRGCIRSLKLTKGTGKPLEVNFAKALELRGVQPVSCPAN

SEQ ID NO: 733 - protein, 510 aa, Homo sapiens
MVARVGLLLRALQLLLWGHLDAQPAERGGQELRKEAEAFLEKYGYLNEQVPKAPTSTRFSDAIRAFQWVSQLPVSGVLDRATLRQMTRPRCGVTDTNSYAAWAERISDLFARHRTKMRRKKRFAKQGNKWYKQHLSYRLVNWPEHLPEPAVRGAVRAAFQLWSNVSALEFWEAPATGPADIRLTFFQGDHNDGLGNAFDGPGGALAHAFLPRRGEAHFDQDERWSLSRRRGRNLFVVLAHEIGHTLGLTHSPAPRALMAPYYKRLGRDALLSWDDVLAVQSLYGKPLGGSVAVQLPGKLFTDFETWDSYSPQGRRPETQGPKYCHSSFDAITVGSHFWEVAADGNVSEPRPLQERWVGLPPNIEAAAVSLNDGDFYFFKGGRCWRFRGPKPVWGLPQLCRAGGLPRHPDAALFFPPLRRLILFKGARYYVLARGGLQVEPYYPRSLQDWGGIPEEVSGALPRPDGSIIFFRDDRYWRLDQAKLQATTSGRWATELPWMGCWHANSGSALF

SEQ ID NO: 734 - protein, 4204 aa, Homo sapiens
MGALWSWWILWAGATLLWGLTQEASVDLKNTGREEFLTAFLQNYQLAYSKAYPRLLISSLSESPASVSILSQADNTSKKVTVRPGESVMVNISAKAEMIGSKIFQHAVVIHSDYAISVQALNAKPDTAELTLLRPIQALGTEYFVLTPPGTSARNVKEFAVVAGAAGASVSVTLKGSVTFNGKFYPAGDVLRVTLQPYNVAQLQSSVDLSGSKVTASSPVAVLSGHSCAQKHTTCNHVVEQLLPTSAWGTHYVVPTLASQSRYDLAFVVASQATKLTYNHGGITGSRGLQAGDVVEFEVRPSWPLYLSANVGIQVLLFGTGAIRNEVTYDPYLVLIPDVAAYCPAYVVKSVPGCEGVALVVAQTKAISGLTIDGHAVGAKLTWEAVPGSEFSYAEVELGTADMIHTAEATTNLGLLTFGLAKAIGYATAADCGRTVLSPVEPSCEGMQCAAGQRCQVVGGKAGCVAESTAVCRAQGDPHYTTFDGRRYDMMGTCSYTMVELCSEDDTLPAFSVEAKNEHRGSRRVSYVGLVTVRAYSHSVSLTRGEVGFVLVDNQRSRLPVSLSEGRLRVYQSGPRAVVELVFGLVVTYDWDCQLALSLPARFQDQVCGLCGNYNGDPADDFLTPDGALAPDAVEFASSWKLDDGDYLCEDGCQNNCPACTPGQAQHYEGDRLCGMLTKLDGPFAVCHDTLDPRPFLEQCVYDLCVVGGERLSLCRGLSAYAQACLELGISVGDWRSPANCPLSCPANSRYELCGPACPTSCNGAAAPSNCSGRPCVEGCVCLPGFVASGGACVPASSCGCTFQGLQLAPGQEVWADELCQRRCTCNGATHQVTCRDKQSCPAGERCSVQNGLLGCYPDRFGTCQGSGDPHYVSFDGRRFDFMGTCTYLLVGSCGQNAALPAFRVLVENEHRGSQTVSYTRAVRVEARGVKVAVRREYPGQVLVDDVLQYLPFQAADGQVQVFRQGRDAVVRTDFGLTVTYDWNARVTAKVPSSYAEALCGLCGNFNGDPADDLALRGGGQAANALAFGNSWQEETRPGCGATEPGDCPKLDSLVAQQLQSKNECGILADPKGPFRECHSKLDPQGAVRDCVYDRCLLPGQSGPLCDALATYAAACQAAGATVHPWRSEELCPLSCPPHSHYEACSYGCPLSCGDLPVPEGCESACREGCVCDAGFVLSGDTCVPVGQCGCLHDDRYYPLGQTFYPGPGCDSLCRCREGGEVSCEPSSCGPHETCRPSGGSLGCVAVGSTTCQASGDPHYTTFDGHRFDFMGTCVYVLAQTCGTRPGLHRFAVLQENVAWGNGRVSVTRVITVQVANFTLRLEQRQWKVTVNGVDMKLPVVLANGQIRASQHGSDVVIETDFGLRVAYDLVYYVRVTVPGNYYQLMCGLCGNYNGDPKDDFQKPNGSQAGNANEFGNSWEEVVSDSPCLPPPTCPPGSEGCIPSEECPPELEKKYQKEEFCGLLSSPTGPLSSCHKLVDPQGPLKDCIFDLCLGGGNLSILCSNIHAYVSACQVAGGHVEPWRNETFCPMECPQNSHYELCADTCSLGCSALSAPLQCPDGCAEGCQCDSGFLYNGQACVPIQQCGCYHNGAYYEPEQTVLIDNCRQQCTCHAGKVVVCQEHSCKPGQVCQPSGGILSCVTKDPCHGVTCRPQETCKEQGGQGVCLPNYEATCWLWGDPHYHSFDGRKFDFQGTCNYVLATTGCPGVSTQGLTPFTVTTKNQNRGNPAVSYVRVVTVAALGTNISIHKDEIGKVRVNGVLTALPVSVADGRISVTQGASKALLVADFGLQVSYDWNWRVDVTLPSSYHGAVCGLCGNMDRNPNNDQVFPNGTLAPSIPIWGGSWRAPGWDPLCWDECRGSCPTCPEDRLEQYEGPGFCGPLAPGTGGPFTTCHAHVPPESFFKGCVLDVCMGGGDRDILCKALASYVAACQAAGVVIEDWRAQVGCEITCPENSHYEVCGPPCPASCPSPAPLTTPAVCEGPCVEGCQCDAGFVLSADRCVPLNNGCGCWANGTYHEAGSEFWADGTCSQWCRCGPGGGSLVCTPASCGLGEVCGLLPSGQHGCQPVSTAECQAWGDPHYVTLDGHRFDFQGTCEYLLSAPCHGPPLGAENFTVTVANEHRGSQAVSYTRSVTLQIYNHSLTLSARWPRKLQVDGVFVTLPFQLDSLLHAHLSGADVVVTTTSGLSLAFDGDSFVRLRVPAAYAGSLCGLCGNYNQDPADDLKAVGGKPAGWQVGGAQGCGECVSKPCPSPCTPEQQESFGGPDACGVISATDGPLAPCHGLVPPAQYFQGCLLDACQVQGHPGGLCPAVATYVAACQAAGAQLREWRRPDFCPFQCPAHSHYELCGDSCPGSCPSLSAPEGCESACREGCVCDAGFVLSGDTCVPVGQCGCLHDDRYYPLGQTFYPGPGCDSLCRCREGGEVSCEPSSCGPHETCRPSGGSLGCVAVGSTTCQASGDPHYTTFDGHRFDFMGTCVYVLAQTCGTRPGLHRFAVLQENVAWGNGRVSVTRVITVQVANFTLRLEQRQWKVTVNGVDMKLPVVLANGQIRASQHGSDVVIETDFGLRVAYDLVYYVRVTVPGNYYQLMCGLCGNYNGDPKDDFQKPNGSQAGNANEFGNSWEEVVPDSPCLPPPTCPPGSAGCIPSDKCPPELEKKYQKEEFCGLLSSPTGPLSSCHKLVDPQGPLKDCIFDLCLGGGNLSILCSNIHAYVSACQAAGGHVEPWRNETFCPMECPQNSHYELCADTCSLGCSALSAPLQCPDGCAEGCQCDSGFLYNGQACVPIQQCGCYHNGVYYEPEQTVLIDNCRQQCTCHVGKVVVCQEHSCKPGQVCQPSGGILSCVTKDPCHGVTCRPQETCKEQGGQGVCLPNYEATCWLWGDPHYHSFDGRKFDFQGTCNYVLATTGCPGVSTQGLTPFTVTTKNQNRGNPAVSYVRVVTVAALGTNISIHKDEIGKVRVNGVLTALPVSVADGRISVAQGASKALLVADFGLQVSYDWNWRVDVTLPSSYHGAVCGLCGNMDRNPNNDQVFPNGTLAPSIPIWGGSWRAPGWDPLCWDECRGSCPTCPEDRLEQYEGPGFCGPLSSGTGGPFTTCHAHVPPESFFKGCVLDVCMGGGDRDILCKALASYVAACQAAGVVIEDWRAQVGCEITCPENSHYEVCGPPCPASCPSPAPLTTPAVCEGPCVEGCQCDAGFVLSADRCVPLNNGCGCWANGTYHEAGSEFWADGTCSQWCRCGPGGGSLVCTPASCGLGEVCGLLPSGQHGCQPVSTAECQAWGDPHYVTLDGHRFDFQGTCEYLLSAPCHGPPLGAENFTVTVANEHRGSQAVSYTRSVTLQIYNHSLTLSARWPRKLQVDGVFVALPFQLDSLLHAHLSGADVVVTTTSGLSLAFDGDSFVRLRVPAAYAASLCGLCGNYNQDPADDLKAVGGKPAGWQVGGAQGCGECVSKPCPSPCTPEQQESFGGPDACGVISATDGPLAPCHGLVPPAQYFQGCLLDACQVQGHPGGLCPAVATYVAACQAAGAQLGEWRRPDFCPLQCPAHSHYELCGDSCPVSCPSLSAPEGCESACREGCVCDAGFVLSGDTCVPVGQCGCLHDGRYYPLGEVFYPGPECERRCECGPGGHVTCQEGAACGPHEECRLEDGVQACHATGCGRCLANGGIHYITLDGRVYDLHGSCSYVLAQVCHPKPGDEDFSIVLEKNAAGDLQRLLVTVAGQVVSLAQGQQVTVDGEAVALPVAVGRVRVTAEGRNMVLQTTKGLRLLFDGDAHLLMSIPSPFRGRLCGLCGNFNGNWSDDFVLPNGSAASSVETFGAAWRAPGSSKGCGEGCGPQGCPVCLAEETAPYESNEACGQLRNPQGPFATCQAVLSPSEYFRQCVYDLCAQKGDKAFLCRSLAAYTAACQAAGVAVKPWRTDSFCPLHCPAHSHYSICTRTCQGSCAALSGLTGCTTRCFEGCECDDRFLLSQGVCIPVQDCGCTHNGRYLPVNSSLLTSDCSERCSCSSSSGLTCQAAGCPPGRVCEVKAEARNCWATRGLCVLSVGANLTTFDGARGATTSPGVYELSSRCPGLQNTIPWYRVVAEVQICHGKTEAVGQVHIFFQDGMVTLTPNKGVWVNGLRVDLPAEKLASVSVSRTPDGSLLVRQKAGVQVWLGANGKVAVIVSNDHAGKLCGACGNFDGDQTNDWHDSQEKPAMEKWRAQDFSPCYG

SEQ ID NO: 735 - protein, 726 aa, Homo sapiens
MLQTKDLIWTLFFLGTAVSLQVDIVPSQGEISVGESKFFLCQVAGDAKDKDISWFSPNGEKLTPNQQRISVVWNDDSSSTLTIYNANIDDAGIYKCVVTGEDGSESEATVNVKIFQKLMFKNAPTPQEFREGEDAVIVCDVVSSLPPTIIWKHKGRDVILKKDVRFIVLSNNYLQIRGIKKTDEGTYRCEGRILARGEINFKDIQVIVNVPPTIQARQNIVNATANLGQSVTLVCDAEGFPEPTMSWTKDGEQIEQEEDDEKYIFSDDSSQLTIKKVDKNDEAEYICIAENKAGEQDATIHLKVFAKPKITYVENQTAMELEEQVTLTCEASGDPIPSITWRTSTRNISSEEKTLDGHMVVRSHARVSSLTLKSIQYTDAGEYICTASNTIGQDSQSMYLEVQYAPKLQGPVAVYTWEGNQVNITCEVFAYPSATISWFRDGQLLPSSNYSNIKIYNTPSASYLEVTPDSENDFGNYNCTAVNRIGQESLEFILVQADTPSSPSIDQVEPYSSTAQVQFDEPEATGGVPILKYKAEWRAVGEEVWHSKWYDAKEASMEGIVTIVGLKPETTYAVRLAALNGKGLGEISAASEFKTQPVQGEPSAPKLEGQMGEDGNSIKVNLIKQDDGGSPIRHYLVRYRALSSEWKPEIRLPSGSDHVMLKSLDWNAEYEVYVVAENQQGKSKAAHFVFRTSAQPTAIPATLGGNSASYTFVSLLFSAVTLLLLC

SEQ ID NO: 736 - protein, 47 aa, Homo sapiens
MKLCVTVLSLLVLVAAFCSLALSAPKASKSALTPVSPGSRSTCMTWN

SEQ ID NO: 737 - protein, 3118 aa, Homo sapiens
MPGAAGVLLLLLLSGGLGGVQAQRPQQQRQSQAHQQRGLFPAVLNLASNALITTNATCGEKGPEMYCKLVEHVPGQPVRNPQCRICNQNSSNPNQRHPITNAIDGKNTWWQSPSIKNGIEYHYVTITLDLQQVFQIAYVIVKAANSPRPGNWILERSLDDVEYKPWQYHAVTDTECLTLYNIYPRTGPPSYAKDDEVICTSFYSKIHPLENGEIHISLINGRPSADDPSPELLEFTSARYIRLRFQRIRTLNADLMMFAHKDPREIDPIVTRRYYYSVKDISVGGMCICYGHARACPLDPATNKSRCECEHNTCGDSCDQCCPGFHQKPWRAGTFLTKTECEACNCHGKAEECYYDENVARRNLSLNIRGKYIGGGVCINCTQNTAGINCETCTDGFFRPKGVSPNYPRPCQPCHCDPIGSLNEVCVKDEKHARRGLAPGSCHCKTGFGGVSCDRCARGYTGYPDCKACNCSGLGSKNEDPCFGPCICKENVEGGDCSRCKSGFFNLQEDNWKGCDECFCSGVSNRCQSSYWTYGKIQDMSGWYLTDLPGRIRVAPQQDDLDSPQQISISNAEARQALPHSYYWSAPAPYLGNKLPAVGGQLTFTISYDLEEEEEDTERVLQLMIILEGNDLSISTAQDEVYLHPSEEHTNVLLLKEESFTIHGTHFPVRRKEFMTVLANLKRVLLQITYSFGMDAIFRLSSVNLESAVSYPTDGSIAAAVEVCQCPPGYTGSSCESCWPRHRRVNGTIFGGICEPCQCFGHAESCDDVTGECLNCKDHTGGPYCDKCLPGFYGEPTKGTSEDCQPCACPLNIPSNNFSPTCHLDRSLGLICDGCPVGYTGPRCERCAEGYFGQPSVPGGSCQPCQCNDNLDFSIPGSCDSLSGSCLICKPGTTGRYCELCADGYFGDAVDAKNCQPCRCNAGGSFSEVCHSQTGQCECRANVQGQRCDKCKAGTFGLQSARGCVPCNCNSFGSKSFDCEESGQCWCQPGVTGKKCDRCAHGYFNFQEGGCTACECSHLGNNCDPKTGRCICPPNTIGEKCSKCAPNTWGHSITTGCKACNCSTVGSLDFQCNVNTGQCNCHPKFSGAKCTECSRGHWNYPRCNLCDCFLPGTDATTCDSETKKCSCSDQTGQCTCKVNVEGIHCDRCRPGKFGLDAKNPLGCSSCYCFGTTTQCSEAKGLIRTWVTLKAEQTILPLVDEALQHTTTKGIVFQHPEIVAHMDLMREDLHLEPFYWKLPEQFEGKKLMAYGGKLKYAIYFEAREETGFSTYNPQVIIRGGTPTHARIIVRHMAAPLIGQLTRHEIEMTEKEWKYYGDDPRVHRTVTREDFLDILYDIHYILIKATYGNFMRQSRISEISMEVAEQGRGTTMTPPADLIEKCDCPLGYSGLSCEACLPGFYRLRSQPGGRTPGPTLGTCVPCQCNGHSSLCDPETSICQNCQHHTAGDFCERCALGYYGIVKGLPNDCQQCACPLISSSNNFSPSCVAEGLDDYRCTACPRGYEGQYCERCAPGYTGSPGNPGGSCQECECDPYGSLPVPCDPVTGFCTCRPGATGRKCDGCKHWHAREGWECVFCGDECTGLLLGDLARLEQMVMSINLTGPLPAPYKMLYGLENMTQELKHLLSPQRAPERLIQLAEGNLNTLVTEMNELLTRATKVTADGEQTGQDAERTNTRAKSLGEFIKELARDAEAVNEKAIKLNETLGTRDEAFERNLEGLQKEIDQMIKELRRKNLETQKEIAEDELVAAEALLKKVKKLFGESRGENEEMEKDLREKLADYKNKVDDAWDLLREATDKIREANRLFAVNQKNMTALEKKKEAVESGKRQIENTLKEGNDILDEANRLADEINSIIDYVEDIQTKLPPMSEELNDKIDDLSQEIKDRKLAEKVSQAESHAAQLNDSSAVLDGILDEAKNISFNATAAFKAYSNIKDYIDEAEKVAKEAKDLAHEATKLATGPRGLLKEDAKGCLQKSFRILNEAKKLANDVKENEDHLNGLKTRIENADARNGDLLRTLNDTLGKLSAIPNDTAAKLQAVKDKARQANDTAKDVLAQITELHQNLDGLKKNYNKLADSVAKTNAVVKDPSKNNAVADADATVKNLEQEADRLIDKLKPIKELEDNLKKNISEIKELINQARKQANSIKVSVSSGGDCIRTYKPEIKKGSYNNIVVNVKTAVADNLLFYLGSAKFIDFLAIEMRKGKVSFLWDVGSGVGRVEYPDLTIDDSYWYRIVASRTGRNGTISVRALDGPKASIVPSTHHSTSPPGYTILDVDANAMLFVGGLTGKLKKADAVRVITFTGCMGETYFDNKPIGLWNFREKEGDCKGCTVSPQVEDSEGTIQFDGEGYALVSRPIRWYPNISTVMFKFRTFSSSALLMYLATRDLRDFMSVELTDGHIKVSYDLGSGMASVVSNQNHNDGKWKSFTLSRIQKQANISIVDIDTNQEENIATSSSGNNFGLDLKADDKIYFGGLPTLRNLRPEVNLKKYSGCLKDIEISRTPYNILSSPDYVGVTKGCSLENVYTVSFPKPGFVELSPVPIDVGTEINLSFSTKNESGIILLGSGGTPAPPRRKRRQTGQAYYAILLNRGRLEVHLSTGARTMRKIVIRPEPNLFHDGREHSVHVERTRGIFTVQVDENRRYMQNLTVEQPIEVKKLFVGGAPPEFQPSPLRNIPPFEGCIWNLVINSVPMDFARPVSFKNADIGRCAHQKLREDEDGAAPAEIVIQPEPVPTPAFPTPTPVLTHGPCAAESEPALLIGSKQFGLSRNSHIAIAFDDTKVKNRLTIELEVRTEAESGLLFYMARINHADFATVQLRNGLPYFSYDLGSGDTHTMIPTKINDGQWHKIKIMRSKQEGILYVDGASNRTISPKKADILDVVGMLYVGGLPINYTTRRIGPVTYSIDGCVRNLHMAEAPADLEQPTSSFHVGTCFANAQRGTYFDGTGFAKAVGGFKVGLDLLVEFEFRTTTTTGVLLGISSQKMDGMGIEMIDEKLMFHVDNGAGRFTAVYDAGVPGHLCDGQWHKVTANKIKHRIELTVDGNQVEAQSPNPASTSADTNDPVFVGGFPDDLKQFGLTTSIPFRGCIRSLKLTKGTGKPLEVNFAKALELRGVQPVSCPAN

SEQ ID NO: 738 - protein, 64 aa, Homo sapiens; identical to SEQ ID NO: 724

SEQ ID NO: 739 - protein, 92 aa, Homo sapiens
MKLCVTVLSLLMLVAAFCSPALSAPMGSDPPTACCFSYTARKLPRNFVVDYYETSSLCSQPAVVFQTKRSKQVCADPSESWVQEYVYDLELN

SEQ ID NO: 740 - protein, 337 aa, Homo sapiens
MAPRARRRRPLFALLLLCALLARLQVALQIAPPCTSEKHYEHLGRCCNKCEPGKYMSSKCTTTSDSVCLPCGPDEYLDSWNEEDKCLLHKVCDTGKALVAVVAGNSTTPRRCACTAGYHWSQDCECCRRNTECAPGLGAQHPLQLNKDTVCKPCLAGYFSDAFSSTDKCRPWTNCTFLGKRVEHHGTEKSDAVCSSSLPARKPPNEPHVYLPGLIILLLFASVALVAAIIFGVCYRKKGKALTGNVTGNSNSTFISSGQVMNFKGDIIVVYVSQTSQEGAAAAAEPMGRPVQEETLARRDSFAGNGPRFPDPCGGPEGLREPEKASRPVQEQGGAKA

SEQ ID NO: 741 - protein, 28 aa, Homo sapiens
ALLLCIALLSSYSIHLLLTCAGIAGTGS

SEQ ID NO: 742 - protein, 118 aa, Homo sapiens
MAWALLLLTLLTQGTGSWAQSALTQPPSASGSPGQSVTISCTGTSSDVGGYNYVSWYQQHPGKAPKLMIYEVSKRPSGVPDRFSGSKSGNTASLTVSGLQAEDEADYYCSSYAGSNNF

SEQ ID NO: 743 - protein, 96 aa, Homo sapiens
MKLCVTVLSLLVLVAAFCSLALSAPMGSDPPTACCFSYTARKLPRNFVVDYYETSSLCSQPAVVAAPGRIPSTRAAPHGPWSGRGRCLPQARDKAR

SEQ ID NO: 744 - protein, 3354 aa, Homo sapiens
MGRHVATSCHVAWLLVLISGCWGQVNRLPFFTNHFFDTYLLISEDTPVGSSVTQLLAQDMDNDPLVFGVSGEEASRFFAVEPDTGVVWLRQPLDRETKSEFTVEFSVSDHQGVITRKVNIQVGDVNDNAPTFHNQPYSVRIPENTPVGTPIFIVNATDPDLGAGGSVLYSFQPPSQFFAIDSARGIVTVIRELDYETTQAYQLTVNATDQDKTRPLSTLANLAIIITDVQDMDPIFINLPYSTNIYEHSPPGTTVRIITAIDQDKGRPRGIGYTIVSGNTNSIFALDYISGVLTLNGLLDRENPLYSHGFILTVKGTELNDDRTPSDATVTTTFNILVIDINDNAPEFNSSEYSVAITELAQVGFALPLFIQVVDKDETQGLNSMFEVYLVGNNSHHFIISPTSVQGKADIRIRVAIPLDYETVDRYDFDLFANESVPDHVGYAKVKITLINENDNRPIFSQPLYNISLYENVTVGTSVLTVLATDNDAGTFGEVSYFFSDDPDRFSLDKDTGLIMLIARLDYELIQRFTLTIIARDGGGEETTGRVRINVLDVNDNVPTFQKDAYVGALRENEPSVTQLVRLRATDEDSPPNNQITYSIVSASAFGSYFDISLYEGYGVISVSRPLDYEQISNGLIYLTVMAMDAGNPPLNSTVPVTIEVFDENDNPPTFSKPAYFVSVVENIMAGATVLFLNATDLDRSREYGQESIIYSLEGSTQFRINARSGEITTTSLLDRETKSEYILIVRAVDGGVGHNQKTGIATVNITLLDINDNHPTWKDAPYYINLVEMTPPDSDVTTVVAVDPDLGENGTLVYSIQPPNKFYSLNSTTGKIRTTHAMLDRENPDPHEAELMRKIVVSVTDCGRPPLKATSSATVFVNLLDLNDNDPTFQNLPFVAEVLEGIPAGVSIYQVVAIDLDEGLNGLVSYRMPVGMPRMDFLINSSSGVVVTTTELDRERIAEYQLRVVASDAGTPTKSSTSTLTIHVLDVNDETPTFFPAVYNVSVSEDVPREFRVVWLNCTDNDVGLNAELSYFITGGNVDGKFSVGYRDAVVRTVVGLDRETTAAYMLILEAIDNGPVGKRHTGTATVFVTVLDVNDNRPIFLQSSYEASVPEDIPEGHSILQLKATDADEGEFGRVWYRILHGNHGNNFRIHVSNGLLMRGPRPLDRERNSSHVLIVEAYNHDLGPMRSSVRVIVYVEDINDEAPVFTQQQYSRLGLRETAGIGTSVIVVQATDRDSGDGGLVNYRILSGAEGKFEIDESTGLIITVNYLDYETKTSYMMNVSATDQAPPFNQGFCSVYITLLNELDEAVQFSNASYEAAILENLALGTEIVRVQAYSIDNLNQITYRFNAYTSTQAKALFKIDAITGVITVQGLVDREKGDFYTLTVVADDGGPKVDSTVQVYITVLDENDNSPRFDFTSDSAVSIPEDCPVGQRVATVKAWDPDAGSNGQVVFSLASGNIAGAFEIVTTNDSIGEVFVARPLDREELDHYILQVVASDRGTPPRKKDHILQVTILDINDNPPVIESPFGYNVSVNENVGGGTAVVQVRATDRDIGINSVLSYYITEGNKDMAFRMDRISGEIATRPAPPDRERQSFYHLVATVEDEGTPTLSATTHVYVTIVDENDNAPMFQQPHYEVLLDEGPDTLNTSLITIQALDLDEGPNGTVTYAIVAGNIVNTFRIDRHMGVITAAKELDYEISHGRYTLIVTATDQCPILSHRLTSTTTVLVNVNDINDNVPTFPRDYEGPFEVTEGQPGPRVWTFLAHDRDSGPNGQVEYSIMDGDPLGEFVISPVEGVLRVRKDVELDRETIAFYNLTICARDRGMPPLSSTMLVGIRVLDINDNDPVLLNLPMNITISENSPVSSFVAHVLASDADSGCNARLTFNITAGNRERAFFINATTGIVTVNRPLDRERIPEYKLTISVKDNPENPRIARRDYDLLLIFLSDENDNHPLFTKSTYQAEVMENSPAGTPLTVLNGPILALDADQDIYAVVTYQLLGAQSGLFDINSSTGVVTVRSGVIIDREAFSPPILELLLLAEDIGLLNSTAHLLITILDDNDNRPTFSPATLTVHLLENCPPGFSVLQVTATDEDSGLNGELVYRIEAGAQDRFLIHLVTGVIRVGNATIDREEQESYRLTVVATDRGTVPLSGTAIVTILIDDINDSRPEFLNPIQTVSVLESAEPGTVIANITAIDHDLNPKLEYHIVGIVAKDDTDRLVPNQEDAFAVNINTGSVMVKSPMNRELVATYEVTLSVIDNASDLPERSVSVPNAKLTVNVLDVNDNTPQFKPFGITYYMERILEGATPGTTLIAVAAVDPDKGLNGLVTYTLLDLVPPGYVQLEDSSAGKVIANRTVDYEEVHWLNFTVRASDNGSPPRAAEIPVYLEIVDINDNNPIFDQPSYQEAVFEDVPVGTIILTVTATDADSGNFALIEYSLGDGESKFAINPTTGDIYVLSSLDREKKDHYILTALAKDNPGDVASNRRENSVQVVIQVLDVNDCRPQFSKPQFSTSVYENEPAGTSVITMMATDQDEGPNGELTYSLEGPGVEAFHVDMDSGLVTTQRPLQSYEKFSLTVVATDGGEPPLWGTTMLLVEVIDVNDNRPVFVRPPNGTILHIREEIPLRSNVYEVYATDKDEGLNGAVRYSFLKTAGNRDWEFFIIDPISGLIQTAQRLDRESQAVYSLILVASDLGQPVPYETMQPLQVALEDIDDNEPLFVRPPKGSPQYQLLTVPEHSPRGTLVGNVTGAVDADEGPNAIVYYFIAAGNEEKNFHLQPDGCLLVLRDLDREREAIFSFIVKASSNRSWTPPRGPSPTLDLVADLTLQEVRVVLEDINDQPPRFTKAEYTAGVATDAKVGSELIQVLALDADIGNNSLVFYSILAIHYFRALANDSEDVGQVFTMGSMDGILRTFDLFMAYSPGYFVVDIVARDLAGHNDTAIIGIYILRDDQRVKIVINEIPDRVRGFEEEFIHLLSNITGAIVNTDNVQFHVDKKGRVNFAQTELLIHVVNRDTNRILDVDRVIQMIDENKEQLRNLFRNYNVLDVQPAISVRLPDDMSALQMAIIVLAILLFLAAMLFVLMNWYYRTVHKRKLKAIVAGSAGNRGFIDIMDMPNTNKYSFDGANPVWLDPFCRNLELAAQAEHEDDLPENLSEIADLWNSPTRTHGTFGREPAAVKPDDDRYLRAAIQEYDNIAKLGQIIREGPIKGSLLKVVLEDYLRLKKLFAQRMVQKASSCHSSISELIQTELDEEPGDHSPGQGSLRFRHKPPVELKGPDGIHVVHGSTGTLLATDLNSLPEEDQKGLGRSLETLTAAEATAFERNARTESAKSTPLHKLRDVIMETPLEITEL

SEQ ID NO: 745 - protein, 393 aa, Homo sapiens
MVARVGLLLRALQLLLWGHLDAQPAERGGQELRKEAEAFLEKYGYLNEQVPKAPTSTRFSDAIRAFQWVSQLPVSGVLDRATLRQMTRPRCGVTDTNSYAAWAERISDLFARHRTKMRRKKRFAKQGNKWYKQHLSYRLVNWPEHLPEPAVRGAVRAAFQLWSNVSALEFWEAPATGPADIRLTFFQGDHNDGLGNAFDGPGGALAHAFLPRRGEAHFDQDERWSLSRRRGRNLFVVLAHEIGHTLGLTHSPAPRALMAPYYKRLGRDALLSWDDVLAVQSLYGKPLGGSVAVQLPGKLFTDFETWDSYSPQGRRPETQGPKYCHSSFDAITVDRQQQLYIFKGSHFWEVAADGNVSEPRPLQERWVGLPPNIEAAAVSLNDGDFYFFKVQSV

SEQ ID NO: 746 - protein, 103 aa, Homo sapiens
MKLCVTVLSLLVLVAAFCSLALSAPMGSDPPTACCFSYTARKLPRNFVVDYYETSSLCSQPAVVEWKLQGVCFQCCSGKDPIHQSCPTWTMVRQRKMPTTGKG

SEQ ID NO: 747 - protein, 115 aa, Homo sapiens
MDTRLLCCAVICLLGAGLSNAGVMQNPRHLVRRRGQEARLRCSPMKGHSHVYWYRQLPEEGLKFMVYLQKENIIDESGMPKERFSAEFPKEGPSILRIQQVVRGDSAAYFCASSP

SEQ ID NO: 748 - protein, 130 aa, Homo sapiens
MVARVGLLLRALQLLLWGHLDAQPAERGGQELRKEAEAFLEKYGYLNEQVPKAPTSTRFSDAIRAFQWVSQLPVSGVLDRATLRQMTRPRCGVTDTNSYAAWAERISDLFARHRTKMRRKKRFAKQGEHC

SEQ ID NO: 749 - protein, 92 aa, Homo sapiens
MKLCVTVLSLLVLVAAFCSLALSAPMGSDPPTACCFSYTARKLPRNFVVDYYETSSLCSQPAVVFQTKRGKQVCADPSESWVQEYVYDLELN

SEQ ID NO: 750 - protein, 1026 aa, Homo sapiens [sequence omitted]

SEQ ID NO: 751 - protein, 241 aa, Homo sapiens
MAGSPTCLTLIYILWQLTEHLSKPKVTMGLQSNKNGTCVTNLTCCMEHGEEDVIYTWKALGQAANESHNGSILPISWRWGESDMTFICVARNPVSRNFSSPILARKLCEGDCLSPLHRRLCPGAADDPDSSMVLLCLLLVPLLLSLFVLGLFLWFLKRERQEEYIEEKKRVDICRETPNICPHSGENTEYDTIPHTNRTILKEDPANTVYSTVEIPKKMENPHSLLTMPDTPRLFAYENVI

SEQ ID NO: 752 - protein, 687 aa, Homo sapiens
MVSYWDTGVLLCALLSCLLLTGSSSGSKLKDPELSLKGTQHIMQAGQTLHLQCRGEAAHKWSLPEMVSKESERLSITKSACGRNGKQFCSTLTLNTAQANHTGFYSCKYLAVPTSKKKETESAIYIFISDTGRPFVEMYSEIPEIIHMTEGRELVIPCRVTSPNITVTLKKFPLDTLIPDGKRIIWDSRKGFIISNATYKEIGLLTCEATVNGHLYKTNYLTHRQTNTIIDVQISTPRPVKLLRGHTLVLNCTATTPLNTRVQMTWSYPDEKNKRASVRRRIDQSNSHANIFYSVLTIDKMQNKDKGLYTCRVRSGPSFKSVNTSVHIYDKAFITVKHRKQQVLETVAGKRSYRLSMKVKAFPSPEVVWLKDGLPATEKSARYLTRGYSLIIKDVTEEDAGNYTILLSIKQSNVFKNLTATLIVNVKPQIYEKAVSSFPDPALYPLGSRQILTCTAYGIPQPTIKWFWHPCNHNHSEARCDFCSNNEESFILDADSNMGNRIESITQRMAIIEGKNKMASTLVVADSRISGIYICIASNKVGTVGRNISFYITDVPNGFHVNLEKMPTEGEDLKLSCTVNKFLYRDVTWILLRTVNNRTMHYSISKQKMAITKEHSITLNLTIMNVSLQDSGTYACRARNVYTGEEILQKKEITIRGEHCNKKAVFSRISKFKSTRNDCTTQSNVKH

SEQ ID NO: 753 - protein, 732 aa, Homo sapiens
MVSWGRFICLVVVTMATLSLARPSFSLVEDTTLEPEDAISSGDDEDDTDGAEDFVSENSNNKRAPYWTNTEKMEKRLHAVPAANTVKFRCPAGGNPMPTMRWLKNGKEFKQEHRIGGYKVRNQHWSLIMESVVPSDKGNYTCVVENEYGSINHTYHLDVVERSPHRPILQAGLPANASTVVGGDVEFVCKVYSDAQPHIQWIKHVEKNGSKYGPDGLPYLKVLKAAGVNTTDKEIEVLYIRNVTFEDAGEYTCLAGNSIGISFHSAWLTVLPAPGREKEITASPDYLEIAIYCIGVFLIACMVVTVILCRMKNTTKKPDFSSQPAVHKLTKRIPLRRQVTVSAESSSSMNSNTPLVRITTRLSSTADTPMLAGVSEYELPEDPKWEFPRDKLTLGKPLGEGCFGQVVMAEAVGIDKDKPKEAVTVAVKMLKDDATEKDLSDLVSEMEMMKMIGKHKNIINLLGACTQDGPLYVIVEYASKGNLREYLRARRPPGMEYSYDINRVPEEQMTFKDLVSCTYQLARGMEYLASQKCIHRDLAARNVLVTENNVMKIADFGLARDINNIDYYKKTTNGRLPVKWMAPEALFDRVYTHQSDVWSFGVLMWEIFTLGGSPYPGIPVEELFKLLKEGHRMDKPANCTNELYMMMRDCWHAVPSQRPTFKQLVEDLDRILTLTTNEEYLDLSQPLEQYSPSYPDTRSSCSSGDDSVFSPDPMPYEPCLPQYPHINGSVKT

SEQ ID NO: 754 - protein, 626 aa, Homo sapiens
MPLLLLLLLLPSPLHPHPICEVSKVASHLEVNCDKRNLTALPPDLPKDTTILHLSENLLYTFSLATLMPYTRLTQLNLDRCELTKLQVDGTLPVLGTLDLSHNQLQSLPLLGQTLPALTVLDVSFNRLTSLPLGALRGLGELQELYLKGNELKTLPPGLLTPTPKLEKLSLANNNLTELPAGLLNGLENLDTLLLQENSLYTIPKGFFGSHLLPFAFLHGNPWLCNCEILYFRRWLQDNAENVYVWKQGVDVKAMTSNVASVQCDNSDKFPVYKYPGKGCPTLGDEGDTDLYDYYPEEDTEGDKVRATRTVVKFPTKAHTTPWGLFYSWSTASLDSQMPSSLHPTQESTKEQTTFPPRWTPNFTLHMESITFSKTPKSTTEPTPSPTTSEPVPEPAPNMTTLEPTPSPTTPEPTSEPAPSPTTPEPTPIPTIATSPTILVSATSLITPKSTFLTTTKPVSLLESTKKTIPELDQPPKLRGVLQGHLESSRNDPFLHPDFCCLLPLGFYVLGLFWLLFASVVLILLLSWVGHVKPQALDSGQGAALTTATQTTHLELQRGRQVTVPRAWLLFLRGSLPTFRSSLFLWVRPNGRVGPLVAGRRPSALSQGRGQDLLSTVSIRYSGHSL

SEQ ID NO: 755 - protein, 68 aa, Homo sapiens
MKLCVTVLSLLVLVAAFCSLALSAPTKSSEWKLQGVCFQCCSGKDPIHQSCPTWTMVRQRKMPTTGKG

SEQ ID NO: 756 - protein, 86 aa, Homo sapiens
MKLCVTVLSLLVLVAAFCSLALSAPMGSDPPTACCFSYTARKLPRNFVVDYYETSSLCSQPAVVAAPHGPWSGRGRCLPQARDKAR

SEQ ID NO: 757 - protein, 228 aa, Homo sapiens
MWSWKCLLFWAVLVTATLCTARPSPTLPEQDALPSSEDDDDDDDSSSEEKETDNTKPNPVAPYWTSPEKMEKKLHAVPAAKTVKFKCPSSGTPNPTLRWLKNGKEFKPDHRIGGYKVRYATWSIIMDSVVPSDKGNYTCIVENEYGSINHTYQLDVVERSPHRPILQAGLPANKTVALGSNVEFMCKVYSDPQPHIQWLKHIEVNGSKIGPDNLPYVQILKPWKRGRQ

SEQ ID NO: 758 - protein, 771 aa, Homo sapiens [sequence omitted]

SEQ ID NO: 759 - protein, 848 aa, Homo sapiens
MLQTKDLIWTLFFLGTAVSLQVDIVPSQGEISVGESKFFLCQVAGDAKDKDISWFSPNGEKLTPNQQRISVVWNDDSSSTLTIYNANIDDAGIYKCVVTGEDGSESEATVNVKIFQKLMFKNAPTPQEFREGEDAVIVCDVVSSLPPTIIWKHKGRDVILKKDVRFIVLSNNYLQIRGIKKTDEGTYRCEGRILARGEINFKDIQVIVNVPPTIQARQNIVNATANLGQSVTLVCDAEGFPEPTMSWTKDGEQIEQEEDDEKYIFSDDSSQLTIKKVDKNDEAEYICIAENKAGEQDATIHLKVFAKPKITYVENQTAMELEEQVTLTCEASGDPIPSITWRTSTRNISSEEKTLDGHMVVRSHARVSSLTLKSIQYTDAGEYICTASNTIGQDSQSMYLEVQYAPKLQGPVAVYTWEGNQVNITCEVFAYPSATISWFRDGQLLPSSNYSNIKIYNTPSASYLEVTPDSENDFGNYNCTAVNRIGQESLEFILVQADTPSSPSIDQVEPYSSTAQVQFDEPEATGGVPILKYKAEWRAVGEEVWHSKWYDAKEASMEGIVTIVGLKPETTYAVRLAALNGKGLGEISAASEFKTQPVQGEPSAPKLEGQMGEDGNSIKVNLIKQDDGGSPIRHYLVRYRALSSEWKPEIRLPSGSDHVMLKSLDWNAEYEVYVVAENQQGKSKAAHFVFRTSAQPTAIPANGSPTSGLSTGAIVGILIVIFVLLLVVVDITCYFLNKCGLFMCIAVNLCGKAGPGAKGKDMEEGKAAFSKDESKEPIVEVRTEEERTPNHDGGKHTEPNETTPLTEPEKGPVEAKPECQETETKPAPAEVKTVPNDATQTKENESKA

SEQ ID NO: 760 - protein, 306 aa, Homo sapiens
MDFWLWPLYFLPVSGALRILPEVKVEGELGGSVTIKCPLPEMHVRIYLCREMAGSGTCGTVVSTTNFIKAEYKGRVTLKQYPRKNLFLVEVTQLTESDSGVYACGAGMNTDRGKTQKVTLNVHSEYEPSWEEQPMPETPKWFHLPYLFQMPAYASSSKFVTRVTTPAQRGKVPPVHHSSPTTQITHRPRVSRASSVAGDKPRTFLPSTTASKISALEGLLKPQTPSYNHHTRLHRQSPLQAGPPTGREDARPGELPEAPRVAATALPKQHLQRLPAARSWSGRCRHRGGPRSRPRSAVAPRPAAGV

SEQ ID NO: 761 - protein, 103 aa, Homo sapiens
SRWPHGLGLLLLLQLLPPSTLSQDRLDAPPPPAAPLPRWSGPIGVSWGLRAAAAGGAFPRGGRWRRSAPGEDEECGRVRDFVAKLANNTHQLSKSLEHRFSSV

SEQ ID NO: 762 - protein, 100 aa, Homo sapiens
MALPALGLDPWSLLGLFLFQLLQLLLPTTTAGGGGQGPMPRVRYYAGDERRALSFFHQKGLQDFDTLLLSGDGNTLYVGAREAILALDIQDPGVPRLKNM

SEQ ID NO: 763 - protein, 189 aa, Homo sapiens
MVPPKPALWALLLALLGTAPSRAYSPACSVPDVLRHYRAIIFEDLQAAVKWGGAGAEKTRPGSRHFHFIQKNLTRPGSSGRRGRPRASCGAQKEHSILLSISSLGRTLRGAVAGGRRGALERAAWTVAVRTEAVMRRHCRTLRQRSRRPKMRPARRRGGRRQLLLRALDAVATCWEKLFALRAPASRDS

SEQ ID NO: 764 - protein, 225 aa, Homo sapiens
MKLANWYWLSSAVLATYGFLVVANNETEEIKDERAKDVCPVRLESRGKCEEAGECPYQVSLPPLTIQLPKQFSRIEEVFKEVQNLKEIVNSLKKSCQDCKLQADDNGDPGRNGLLLPSTGAPGEVGDNRVRELESEVNKLSSELKNAKEEINVLHGRLEKLNLVNMNNIENYVDSKVANLTFVVNSLDGKCSKCPSQEQIQSRPGMYNNVFLSYVHKCYTAREYL

SEQ ID NO: 765 - protein, 665 aa, Homo sapiens
MVSYWDTGVLLCALLSCLLLTGSSSGSKLKDPELSLKGTQHIMQAGQTLHLQCRGEAAHKWSLPEMVSKESERLSITKSACGRNGKQFCSTLTLNTAQANHTGFYSCKYLAVPTSKKKETESAIYIFISDTGRPFVEMYSEIPEIIHMTEGRELVIPCRVTSPNITVTLKKFPLDTLIPDGKRIIWDSRKGFIISNATYKEIGLLTCEATVNGHLYKTNYLTHRQTNTIIDVQISTPRPVKLLRGHTLVLNCTATTPLNTRVQMTWSYPDEKNKRASVRRRIDQSNSHANIFYSVLTIDKMQNKDKGLYTCRVRSGPSFKSVNTSVHIYDKAFITVKHRKQQVLETVAGKRSYRLSMKVKAFPSPEVVWLKDGLPATEKSARYLTRGYSLIIKDVTEEDAGNYTILLSIKQSNVFKNLTATLIVNVKPQIYEKAVSSFPDPALYPLGSRQILTCTAYGIPQPTIKWFWHPCNHNHSEARCDFCSNNEESFILDADSNMGNRIESITQRMAIIEGKNKMASTLVVADSRISGIYICIASNKVGTVGRNISFYITDVPNGFHVNLEKMPTEGEDLKLSCTVNKFLYRDVTWILLRTVNNRTMHYSISKQKMAITKEHSITLNLTIMNVSLQDSGTYACRARNVYTGEEILQKKEITIRGSEEMLLPK

SEQ ID NO: 766 - protein, 1027 aa, Homo sapiens
MRAALWTLGLGPLLLNLWAVPIGGPGALRLAYRHSTCDGVVLVRHHGAWGYVCNQEWTLAEASVVCRQLGCGPAVGAPKYVPLPGEMAQPWLHNVSCRGNESSLWECSLGSWCQSPCPHAWVVVALCSNGTFRELRLVKGRSPCAGLPEIRNVNGVDRLCVLHVEEAMVFCRELGCGPVLQAPRRDVGVVRKYLACRGTEPTIRSCRLDNNFRSGCDLRLDAEVVCSGHTEARLVGGEHPCAGRLEVTWGTVCDAALDLATAHVVCRELQCGAVVSTPEGARFGRGSGPVWTEAFRCAGNESLLFHCPRGRGSQCGHGHDAGLRCSEFRMVNGSSSCEGRVEFQVQGSWAPLCATHWDIADATVLCHQLNCGNAVAAPGGGHFGDGDAAIWPDAFHCEGTESYLWNCPVSTLGAPACAPGNTASAVCSGLAHALRLREGQSRCDGRVEVSLDGVWGRVLDDAWDLRGAGVVCRQLGCRGAQQAYDAPAPSRGSVQVALSRVRCLGTETRLTQCNVSATLQEPAGTSRDAGVVCSGEVGTASPMARRHGIPGALTLSLHREPQGAAGRGAGALHGGAWGTVCDDAWDLRDAHVVCRQLGCGRALSALGAAHFGAGAGRIWLDELGCQGHESALWQCPSAGWGRHDWRHKEDAGVFCSESVALRLRGGTCCCAGWLDVFYNGTWGAMCSNALKDLSLSIICKQLGCGVWGVGLAGEQALPLCGHRDRLGGQHRVPQAAQLHSVAMPFPPMAPALLRPSRAGLSEDRPQAAGEPLNCSSWLGCPEEGALRVRGGEDRCSGRVELWHAGSWGTVCDDGWDLADAEVVCRQLGCGRAVAALGAAAFGPGSGPVWLDEVGCRGSEASLWGCPAERWGRGDRAHEEDAGVRCWEPGPGPPLPAAPFRTFWVVSVVLGSLLGLLLLGLMAFLILPRVTQAMQRGLGRSEVSPGEAIYDVIGEMPPAGLYEEIMEAEAVLQDEEDGSVVKVDTEAAVSGEVSNLLEGQSIRAEGGHSRPVSQGYDEAAFPLEEMTL

SEQ ID NO: 767 - protein, 117 aa, Homo sapiens
MDWSPLLLILLTHCTGSWAQSVLTQPPSVSWATRQRLTVSCTGSSSNTGTGYNVNCWQLPRTDPKLLTYRNNNRPSGISERFSASRSGNTASLTITGLQPEDEADYYCSALDSSLSA

SEQ ID NO: 768 - protein, 263 aa, Homo sapiens
MAPRARRRRPLFALLLLCALLARLQVALQIAPPCTSEKHYEHLGRCCNKCEPGKYMSSKCTTTSDSVCLPCGPDEYLDSWNEEDKCLLHKVCDTGKALVAVVAGNSTTPRRCACTAGYHWSQDCECCRRNTECAPGLGAQHPLQLNKDTVCKPCLAGYFSDAFSSTDKCRPWTNCTFLGKRVEHHGTEKSDAVCSSSLPARKPPNEPHVYLPGLIILLLFASVALVAAIIFGVCYRKKGKALTANLWHWINEACGRLSGDKES

SEQ ID NO: 769 - protein, 775 aa, Homo sapiens
MGDHLDLLLGVVLMAGPVFGIPSCSFDGRIAFYRFCNLTQVPQVLNTTERLLLSFNYIRTVTASSFPFLEQLQLLELGSQYTPLTIDKEAFRNLPNLRILDLGSSKIYFLHPDAFQGLFHLFELRLYFCGLSDAVLKDGYFRNLKALTRLDLSKNQIRSLYLHPSFGKLNSLKSIDFSSNQIFLVCEHELEPLQGKTLSFFSLAANSLYSRVSVDWGKCMNPFRNMVLEILDVSGNGWTVDITGNFSNAISKSQAFSLILAHHIMGAGFGFHNIKDPDQNTFAGLARSSVRHLDLSHGFVFSLNSRVFETLKDLKVLNLAYNKINKIADEAFYGLDNLQVLNLSYNLLGELYSSNFYGLPKVAYIDLQKNHIAIIQDQTFKFLEKLQTLDLRDNALTTIHFIPSIPDIFLSGNKLVTLPKINLTANLIHLSENRLENLDILYFLLRVPHLQILILNQNRFSSCSGDQTPSENPSLEQLFLGENMLQLAWETELCWDVFEGLSHLQVLYLNHNYLNSLPPGVFSHLTALRGLSLNSNRLTVLSHNDLPANLEILDISRNQLLAPNPDVFVSLSVLDITHNKFICECELSTFINWLNHTNVTIAGPPADIYCVYPDSFSGVSLFSLSTEGCDEEEVLKSLKFSLFIVCTVTLTLFLMTILTVTKFRGFCFICYKTAQRLVFKDHPQGTEPDMYKYDAYLCFSSKDFTWVQNALLKHLDTQYSDQNRFNLCFEERDFVPGENRIANIQDAIWNSRKIVCLVSRHFLRDGWCLEAFSYA

SEQ ID NO: 770 - protein, 246 aa, Homo sapiens
MPHTLWMVWVLGVIISLSKEESSNQASLSCDRNGICKGSSGSLNSIPSGLTEAVKSLDLSNNRITYISNSDLQRCVNLQALVLTSNGINTIEEDSFSSLGSLEHLDLSYNYLSNLSSSWFKPLSSLTFLNLLGNPYKTLGETSLFSHLTKLQILRVGNMDTFTKIQRKDFAGLTFLEELEIDASDLQSYEPKSLKSIQNVSHLILHMKQHILLLEIFVDVTSSVECLELRDTDLDTFHFSELSTGE

SEQ ID NO: 771 - protein, 791 aa, Homo sapiens
MYAFYSLLIYIFYSLFRRDGGAAAAAEPGDPAQRARKPRGRRRPDLPAPELWTELTGLAASSEPEDGSEGAAEGRAAAVSLEEALLRLAEFLSVQLGAEESCGGPADLGQSGEVPSLLTVTSQLLALLAWLRSPRGRQALLQGTQPAPRVRPPSPDGSTSQEESPSHFTAVPGEPLGDETQGQQPLQLEEDQRAWQRLEQLILGQLEELKQQLEQQEEELGRLRLGVGATDSEKRVQHLTLENEALKQSLSLMRDLLLHWGPGPPIRAPQEEAEALLELQGRLQEAQDTTEALRAQLGVQEVQLQGLQGALQQLQQETEQNCRRELQQMHGQLAGLRARMASLRQGCGDLRGLVSTFTQSCQGSLSEARGQVSWALGALSSGGPGTQLPEGQQGPPAGCPGRLPELKGNIRVLCRLRPGTSSSLVSVEPGPGGTVTTCYRGRHRRFRLDWVFPPDASQEEVFRELEPAVLSCLRGYSVCIFTYGQTGTGKTYSMEGPPEDPGIVPRALQSLFREMGAGRQHRVTLSMVEIYNEAVRDLLAPGPPERLAVRQGPEGQGGIQVAGLTHWDVPNLETLHQMLKLGRSNRATAATAMNQRSSRSHALVTLTLRAASPPRAPGTAGTLHLVDLAGSERARKAGAAGPPRGDPDGARRLREAQTINRSLLALGGVMAALRAHRPHVPFRDSQLTRLLQPALGPGTTAVLLLQISTRPEDLGETVCSLKFADRVGQVELGPARRRRVPRSSGTPSSLSTDTPLTGTPCTPTPSPGSPPCPSPDNGSGSALAPAEGLPL

SEQ ID NO: 772 - protein, 744 aa, Homo sapiens
MYAFYSLLIYIFYSLFRRDGGAAAAAEPGDPAQRARKPRGRRRPDLPAPELWTELTGLAASSEPEDGSEGAAEGRAAAVSLEEALLRLAEFLSVQLGAEESCGGPADLGQSGEVPSLLTVTSQLLALLAWLRSPRGRQALLQGTQPAPRVRPPSPDGSTSQEESPSHFTAVPGEPLGDETQGQQPLQLEEDQRAWQRLEQLILGQLEELKQQLEQQEEELGRLRLGVGATDSEKRVQHLTLENEALKQSLSLMRDLLLHWGPGPPIRAPQEEAEALLELQGRLQEAQDTTEALRAQLQQETEQNCRRELQQMHGQLAGLRARMASLRQGCGDLRGLVSTFTQSCQGSLSEARGQVSWALGALSSGGPGTQLPEGQQGPPAGCPGRLPELKGNIRVLCRLRPGTSSSLVSVEPGPGGTVTTCYRGRHRRFRLDWVFPPDASQEEVFRELEPAVLSCLRGYSVCIFTYGQTGTGKTYSMEGPPEDPGIVPRALQSLFREMGAGRQHRVTLSMVEIYNEAVRDLLAPGPPERLAVRQGPEGQGGIQVAGLTHWDVPNLETLHQMLKLGRSNRATAATAMNQRSSRSHALVTLTLRAASPPRAPGTAGTLHLVDLAGSERARKAGAAGPPRGDPDGARRLREAQTINRSLLALGGVMAALRAHRPHVPFRDSQLTRLLQPALGPGTTAVLLLQISTRPEDLGETVCSLKFADRVGQVELGPARRRRVPRSSGTPSSLSTDTPLTGTPC

SEQ ID NO: 773 - protein, 25 aa, Homo sapiens
MCCTKSLLLAALMSVLLLHLCGESE

SEQ ID NO: 774 - protein, 1366 aa, Homo sapiens
MKSGSGGGSPTSLWGLLFLSAALSLWPTSGEICGPGIDIRNDYQQLKRLENCTVIEGYLHILLISKAEDYRSYRFPKLTVITEYLLLFRVAGLESLGDLFPNLTVIRGWKLFYNYALVIFEMTNLKDIGLYNLRNITRGAIRIEKNADLCYLSTVDWSLILDAVSNNYIVGNKPPKECGDLCPGTMEEKPMCEKTTINNEYNYRCWTTNRCQKMCPSTCGKRACTENNECCHPECLGSCSAPDNDTACVACRHYYYAGVCVPACPPNTYRFEGWRCVDRDFCANILSAESSDSEGFVIHDGECMQECPSGFIRNGSQSMYCIPCEGPCPKVCEEEKKTKTIDSVTSAQMLQGCTIFKGNLLINIRRGNNIASELENFMGLIEVVTGYVKIRHSHALVSLSFLKNLRLILGEEQLEGNYSFYVLDNQNLQQLWDWDHRNLTIKAGKMYFAFNPKLCVSEIYRMEEVTGTKGRQSKGDINTRNNGERASCESDVLHFTSTTTSKNRIIITWHRYRPPDYRDLISFTVYYKEAPFKNVTEYDGQDACGSNSWNMVDVDLPPNKDVEPGILLHGLKPWTQYAVYVKAVTLTMVENDHIRGAKSEILYIRTNASVPSIPLDVLSASNSSSQLIVKWNPPSLPNGNLSYYIVRWQRQPQDGYLYRHNYCSKDKIPIRKYADGTIDIEEVTENPKTEVCGGEKGPCCACPKTEAEKQAEKEEAEYRKVFENFLHNSIFVPRPERKRRDVMQVANTTMSSRSRNTTAADTYNITDPEELETEYPFFESRVDNKERTVISNLRPFTLYRIDIHSCNHEAEKLGCSASNFVFARTMPAEGADDIPGPVTWEPRPENSIFLKWPEPENPNGLILMYEIKYGSQVEDQRECVSRQEYRKYGGAKLNRLNPGNYTARIQATSLSGNGSWTDPVFFYVQAKRYENFIHLIIALPVAVLLIVGGLVIMLYVFHRKRNNSRLGNGVLYASVNPEYFSAADVYVPDEWEVAREKITMSRELGQGSFGMVYEGVAKGVVKDEPETRVAIKTVNEAASMRERIEFLNEASVMKEFNCHHVVRLLGVVSQGQPTLVIMELMTRGDLKSYLRSLRPEMENNPVLAPPSLSKMIQMAGEIADGMAYLNANKFVHRDLAARNCMVAEDFTVKIGDFGMTRDIYETDYYRKGGKGLLPVRWMSPESLKDGVFTTYSDVWSFGVVLWEIATLAEQPYQGLSNEQVLRFVMEGGLLDKPDNCPDMLFELMRMCWQYNPKMRPSFLEIISSIKEEMEPGFREVSFYYSEENKLPEPEELDLEPENMESVPLDPSASSSSLPLPDRHSGHKAENGPGPGVLVLRASFDERQPYAHMNGGRKNERALPLPQSSTC

SEQ ID NO: 775 - protein, 1153 aa, Homo sapiens
MALRVLLLTALTLCHGFNLDTENAMTFQENARGFGQSVVQLQGSRVVVGAPQEIVAANQRGSLYQCDYSTGSCEPIRLQVPVEAVNMSLGLSLAATTSPPQLLACGPTVHQTCSENTYVKGLCFLFGSNLRQQPQKFPEALRGCPQEDSDIAFLIDGSGSIIPHDFRRMKEFVSTVMEQLKKSKTLFSLMQYSEEFRIHFTFKEFQNNPNPRSLVKPITQLLGRTHTATGIRKVVRELFNITNGARKNAFKILVVITDGEKFGDPLGYEDVIPEADREGVIRYVIGVGDAFRSEKSRQELNTIASKPPRDHVFQVNNFEALKTIQNQLREKIFAIEGTQTGSSSSFEHEMSQEGFSAAITSNGPLLSTVGSYDWAGGVFLYTSKEKSTFINMTRVDSDMNDAYLGYAAAIILRNRVQSLVLGAPRYQHIGLVAMFRQNTGMWESNANVKGTQIGAYFGASLCSVDVDSNGSTDLVLIGAPHYYEQTRGGQVSVCPLPRGQRARWQCDAVLYGEQGQPWGRFGAALTVLGDVNGDKLTDVAIGAPGEEDNRGAVYLFHGTSGSGISPSHSQRIAGSKLSPRLQYFGQSLSGGQDLTMDGLVDLTVGAQGHVLLLRSQPVLRVKAIMEFNPREVARNVFECNDQVVKGKEAGEVRVCLHVQKSTRDRLREGQIQSVVTYDLALDSGRPHSRAVFNETKNSTRRQTQVLGLTQTCETLKLQLPNCIEDPVSPIVLRLNFSLVGTPLSAFGNLRPVLAEDAQRLFTALFPFEKNCGNDNICQDDLSITFSFMSLDCLVVGGPREFNVTVTVRNDGEDSYRTQVTFFFPLDLSYRKVSTLQNQRSQRSWRLACESASSTEVSGALKSTSCSINHPIFPENSEVTFNITFDVDSKASLGNKLLLKANVTSENNMPRTNKTEFQLELPVKYAVYMVVTSHGVSTKYLNFTASENTSRVMQHQYQVSNLGQRSLPISLVFLVPVRLNQTVIWDRPQVTFSENLSSTCHTKERLPSHSDFLAELRKAPVVNCSIAVCQRIQCDIPFFGIQEEFNATLKGNLSFDWYIKTSHNHLLIVSTAEILFNDSVFTLLPGQGAFVRSQTETKVEPFEVPNPLPLIVGSSVGGLLLLALITAALYKLGFFKRQYKDMMSEGGPPGAEPQ

SEQ ID NO: 776 - protein, 1367 aa, Homo sapiens
MKSGSGGGSPTSLWGLLFLSAALSLWPTSGEICGPGIDIRNDYQQLKRLENCTVIEGYLHILLISKAEDYRSYRFPKLTVITEYLLLFRVAGLESLGDLFPNLTVIRGWKLFYNYALVIFEMTNLKDIGLYNLRNITRGAIRIEKNADLCYLSTVDWSLILDAVSNNYIVGNKPPKECGDLCPGTMEEKPMCEKTTINNEYNYRCWTTNRCQKMCPSTCGKRACTENNECCHPECLGSCSAPDNDTACVACRHYYYAGVCVPACPPNTYRFEGWRCVDRDFCANILSAESSDSEGFVIHDGECMQECPSGFIRNGSQSMYCIPCEGPCPKVCEEEKKTKTIDSVTSAQMLQGCTIFKGNLLINIRRGNNIASELENFMGLIEVVTGYVKIRHSHALVSLSFLKNLRLILGEEQLEGNYSFYVLDNQNLQQLWDWDHRNLTIKAGKMYFAFNPKLCVSEIYRMEEVTGTKGRQSKGDINTRNNGERASCESDVLHFTSTTTSKNRIIITWHRYRPPDYRDLISFTVYYKEAPFKNVTEYDGQDACGSNSWNMVDVDLPPNKDVEPGILLHGLKPWTQYAVYVKAVTLTMVENDHIRGAKSEILYIRTNASVPSIPLDVLSASNSSSQLIVKWNPPSLPNGNLSYYIVRWQRQPQDGYLYRHNYCSKDKIPIRKYADGTIDIEEVTENPKTEVCGGEKGPCCACPKTEAEKQAEKEEAEYRKVFENFLHNSIFVPRPERKRRDVMQVANTTMSSRSRNTTAADTYNITDPEELETEYPFFESRVDNKERTVISNLRPFTLYRIDIHSCNHEAEKLGCSASNFVFARTMPAEGADDIPGPVTWEPRPENSIFLKWPEPENPNGLILMYEIKYGSQVEDQRECVSRQEYRKYGGAKLNRLNPGNYTARIQATSLSGNGSWTDPVFFYVQAKTGYENFIHLIIALPVAVLLIVGGLVIMLYVFHRKRNNSRLGNGVLYASVNPEYFSAADVYVPDEWEVAREKITMSRELGQGSFGMVYEGVAKGVVKDEPETRVAIKTVNEAASMRERIEFLNEASVMKEFNCHHVVRLLGVVSQGQPTLVIMELMTRGDLKSYLRSLRPEMENNPVLAPPSLSKMIQMAGEIADGMAYLNANKFVHRDLAARNCMVAEDFTVKIGDFGMTRDIYETDYYRKGGKGLLPVRWMSPESLKDGVFTTYSDVWSFGVVLWEIATLAEQPYQGLSNEQVLRFVMEGGLLDKPDNCPDMLFELMRMCWQYNPKMRPSFLEIISSIKEEMEPGFREVSFYYSEENKLPEPEELDLEPENMESVPLDPSASSSSLPLPDRHSGHKAENGPGPGVLVLRASFDERQPYAHMNGGRKNERALPLPQSSTC

SEQ ID NO: 777 - protein, 818 aa, Homo sapiens
MWSWKCLLFWAVLVTATLCTARPSPTLPEQAQPWGAPVEVESFLVHPGDLLQLRCRLRDDVQSINWLRDGVQLAESNRTRITGEEVEVQDSVPADSGLYACVTSSPSGSDTTYFSVNVSDALPSSEDDDDDDDSSSEEKETDNTKPNPVAPYWTSPEKMEKKLHAVPAAKTVKFKCPSSGTPNPTLRWLKNGKEFKPDHRIGGYKVRYATWSIIMDSVVPSDKGNYTCIVENEYGSINHTYQLDVVERSPHRPILQAGLPANKTVALGSNVEFMCKVYSDPQPHIQWLKHIEVNGSKIGPDNLPYVQILKTAGVNTTDKEMEVLHLRNVSFEDAGEYTCLAGNSIGLSHHSAWLTVLEALEERPAVMTSPLYLEIIIYCTGAFLISCMVGSVIVYKMKSGTKKSDFHSQMAVHKLAKSIPLRRQVSADSSASMNSGVLLVRPSRLSSSGTPMLAGVSEYELPEDPRWELPRDRLVLGKPLGEGCFGQVVLAEAIGLDKDKPNRVTKVAVKMLKSDATEKDLSDLISEMEMMKMIGKHKNIINLLGACTQDGPLYVIVEYASKGNLREYLQARRPPGLEYCYNPSHNPEEQLSSKDLVSCAYQVARGMEYLASKKCIHRDLAARNVLVTEDNVMKIADFGLARDIHHIDYYKKTTNGRLPVKWMAPEALFDRIYTHQSDVWSFGVLLWEIFTLGGSPYPGVPVEELFKLLKEGHRMDKPSNCTNELYMMMRDCWHAVPSQRPTFKQLVEDLDRIVALTSNQEYLDLSMPLDQYSPSFPDTRSSTCSSGEDSVFSHEPLPEEPCLPRHPAQLANGGLKRR

SEQ ID NO: 778 - protein, 155 aa, Homo sapiens
MTPGKTSLVSLLLLLSLEAIVKAGITIPRNPGCPNSEDKNFPRTVMVNLNIHNRNTNTNPKRSSDYYNRSTSPWNLHRNEDPERYPSVIWEAKCRHLGCINADGNVDYHMNSVPIQQEILVLRREPPHCPNSFRLEKILVSVGCTCVTPIVHHVA

SEQ ID NO: 779 - protein, 1339 aa, Homo sapiens
MAPRCPWPWPRRRRLLDVLAPLVLLLGVRAASAEPERISEEVGLLQLLGDPPPQQVTQTDDPDVGLAYVFGPDANSGQVARYHFPSLFFRDFSLLFHIRPATEGPGVLFAITDSAQAMVLLGVKLSGVQDGHQDISLLYTEPGAGQTHTAASFRLPAFVGQWTHLALSVAGGFVALYVDCEEFQRMPLARSSRGLELEPGAGLFVAQAGGADPDKFQGVIAELKVRRDPQVSPMHCLDEEGDDSDGASGDSGSGLGDARELLREETGAALKPRLPAPPPVTTPPLAGGSSTEDSRSEEVEEQTTVASLGAQTLPGSDSVSTWDGSVRTPGGRVKEGGLKGQKGEPGVPGPPGRAGPPGSPCLPGPPGLPCPVSPLGPAGPALQTVPGPQGPPGPPGRDGTPGRDGEPGDPGEDGKPGDTGPQGFPGTPGDVGPKGDKGDPGVGERGPPGPQGPPGPPGPSFRHDKLTFIDMEGSGFGGDLEALRGPRGFPGPPGPPGVPGLPGEPGRFGVNSSDVPGPAGLPGVPGREGPPGFPGLPGPPGPPGREGPPGRTGQKGSLGEAGAPGHKGSKGAPGPAGARGESGLAGAPGPAGPPGPPGPPGPPGPGLPAGFDDMEGSGGPFWSTARSADGPQGPPGLPGLKGDPGVPGLPGAKGEVGADGVPGFPGLPGREGIAGPQGPKGDRGSRGEKGDPGKDGVGQPGLPGPPGPPGPVVYVSEQDGSVLSVPGPEGRPGFAGFPGPAGPKGNLGSKGERGSPGPKGEKGEPGSIFSPDGGALGPAQKGAKGEPGFRGPPGPYGRPGYKGEIGFPGRPGRPGMNGLKGEKGEPGDASLGFGMRGMPGPPGPPGPPGPPGTPVYDSNVFAESSRPGPPGLPGNQGPPGPKGAKGEVGPPGPPGQFPFDFLQLEAEMKGEKGDRGDAGQKGERGEPGGGGFFGSSLPGPPGPPGPPGPRGYPGIPGPKGESIRGQPGPPGPQGPPGIGYEGRQGPPGPPGPPGPPSFPGPHRQTISVPGPPGPPGPPGPPGTMGASSGVRLWATRQAMLGQVHEVPEGWLIFVAEQEELYVRVQNGFRKVQLEARTPLPRGTDNEVAALQPPVVQLHDSNPYPRREHPHPTARPWRADDILASPPRLPEPQPYPGAPHHSSYVHLRPARPTSPPAHSHRDFQPVLHLVALNSPLSGGMRGIRGADFQCFQQARAVGLAGTFRAFLSSRLQDLYSIVRRADRAAVPIVNLKDELLFPSWEALFSGSEGPLKPGARIFSFDGKDVLRHPTWPQKSVWHGSDPNGRRLTESYCETWRTEAPSATGQASSLLGGRLLGQSAASCHHAYIVLCIENSFMTASK

SEQ ID NO: 780 - protein, 669 aa, Homo sapiens
MLTFFLVSGGSLWLFVEFVLSLLEKMQTQEILRILRLPELGDLGQFFRSLSATTLDSGGARRSVIGSGPQLLTHYYDDARTMYQVFRRGLSISGNGPCLGFRKPKQPYQWLSYQEVADRAEFLGSGLLQHNCKACTDQFIGVFAQNRPEWIIVELACYTYSMVVVPLYDTLGPGAIRYIINTADISTVIVDKPQKAVLLLEHVERKETPGLKLIILMDPFEEALKERGQKCGVVIKSMQAVEDCGQENHQAPVPPQPDDLSIVCFTSGTTGNPKGAMLTHGNVVADFSGFLKVTEKVIFPRQDDVLISFLPLAHMFERVIQSVVYCHGGRVGFFQGDIRLLSDDMKALCPTIFPVVPRLLNRMYDKIFSQANTPLKRWLLEFAAKRKQAEVRSGIIRNDSIWDELFFNKIQASLGGCVRMIVTGAAPASPTVLGFLRAALGCQVYEGYGQTECTAGCTFTTPGDWTSGHVGAPLPCNHIKLVDVEELNYWACKGEGEICVRGPNVFKGYLKDPDRTKEALDSDGWLHTGDIGKWLPGEYVAPEKIENIYIRSQPVAQIYVHGDSLKAFLVGIVVPDPEVMPSWAQKRGIEGTYADLCTNKDLKKAILEDMVRLGKESGLHSFEQVKAIHIHSDMFSVQNGLLTPTLKAKRPELREYFKKQIEELYSISM

SEQ ID NO: 781 - protein, 58 aa, Homo sapiens
MGNHLSLLLFAMVACYPGNGTGYVRHVDNPNGDGRCVTCIYYLNKDWDAKVRNNCLVF

SEQ ID NO: 782 - protein, 765 aa, Homo sapiens
LLALLLLLLLLLLLQLQHLAAAAADPLLGGQGPAKDCEKDQFQCRNERCIPSVWRCDEDDDCLDHSDEDDCPKKTCADSDFTCDNGHCIHERWKCDGEEECPDGSDESEATCTKQVCPAEKLSCGPTSHKCVPASWRCDGEKDCEGGADEAGCATSLGTCRGDEFQCGDGTCVLAIKHCNQEQDCPDGSDEAGCLQGLNECLHNNGGCSHICTDLKIGFECTCPAGFQLLDQKTCGDIDECKDPDACSQICVNYKGYFKCECYPGYEMDLLTKNCKAAAGKSPSLIFTNRHEVRRIDLVKRNYSRLIPMLKNVVALDVEVATNRIYWCDLSYRKIYSAYMDKASDPKEQEVLIDEQLHSPEGLAVDWVHKHIYWTDSGNKTISVATVDGGRRRTLFSRNLSEPRAIAVDPLRGFMYWSDWGDQAKIEKSGLNGVDRQTLVSDNIEWPNGITLDLLSQRLYWVDSKLHQLSSIDFSGGNRKTLISSTDFLSHPFGIAVFEDKVFWTDLENEAIFSANRLNGLEISILAENLNNPHDIVIFHELKQPRAPDACELSVQPNGGCEYLCLPAPQISSHSPKYTCACPDTMWLGPDMKRCYRAPQSTSTTTLASTMTRTVPATTRAPGTTVHRSTYQNHSTETPSLTAAVPSSVSVPRAPSISPSTLSPATSNHSQHYANEDSKMGSTVTAAVIGIIVPIVVIALLCMSGYLIWRNWKRKNTKSMNFDNPVYRKTTEEEDEDELHIGRTAQIGHVYPARVALSLEDDGLP

SEQ ID NO: 783 - protein, 1887 aa, Homo sapiens
MGWGSRCCCPGRLDLLCVLALLGGCLLPVCRTRVYTNHWAVKIAGGFPEANRIASKYGFINIGQIGALKDYYHFYHSRTIKRSVISSRGTHSFISMEPKVEWIQQQVVKKRTKRDYDFSRAQSTYFNDPKWPSMWYMHCSDNTHPCQSDMNIEGAWKRGYTGKNIVVTILDDGIERTHPDLMQNYDALASCDVNGNDLDPMPRYDASNENKHGTRCAGEVAAAANNSHCTVGIAFNAKIGGVRMLDGDVTDMVEAKSVSFNPQHVHIYSASWGPDDDGKTVDGPAPLTRQAFENGVRMGRRGLGSVFVWASGNGGRSKDHCSCDGYTNSIYTISISSTAESGKKPWYLEECSSTLATTYSSGESYDKKIITTDLRQRCTDNHTGTSASAPMAAGIIALALEANPFLTWRDVQHVIVRTSRAGHLNANDWKTNAAGFKVSHLYGFGLMDAEAMVMEAEKWTTVPRQHVCVESTDRQIKTIRPNSAVRSIYKASGCSDNPNRHVNYLEHVVVRITITHPRRGDLAIYLTSPSGTRSQLLANRLFDHSMEGFKNWEFMTIHCWGERAAGDWVLEVYDTPSQLRNFKTPGKLKEWSLVLYGTSVQPYSPTNEFPKVERFRYSRVEDPTDDYGTEDYAGPCDPECSEVGCDGPGPDHCNDCLHYYYKLKNNTRICVSSCPPGHYHADKKRCRKCAPNCESCFGSHGDQCMSCKYGYFLNEETNSCVTHCPDGSYQDTKKNLCRKCSENCKTCTEFHNCTECRDGLSLQGSRCSVSCEDGRYFNGQDCQPCHRFCATCAGAGADGCINCTEGYFMEDGRCVQSCSISYYFDHSSENGYKSCKKCDISCLTCNGPGFKNCTSCPSGYLLDLGMCQMGAICKDGEYVDEHGHCQTCEASCAKCQGPTQEDCTTCPMTRIFDDGRCVSNCPSWKFEFENQCHPCHHTCQRCQGSGPTHCTSCGADNYGREHFLYQGECGDSCPEGHYATEGNTCLPCPDNCELCHSVHVCTRCMKGYFIAPTNHTCQKLECGQGEVQDPDYEECVPCEEGCLGCSLDDPGTCTSCAMGYYRFDHHCYKTCPEKTYSEEVECKACDSNCGSCDQNGCYWCEEGFFLLGGSCVRKCGPGFYGDQEMGECESCHRACETCTGPGHDECSSCQEGLQLLRGMCVHATKTQEEGKFWNEAVSTANLSVVKSLLQERRRWKVQIKRDILRKLQPCHSSCKTCNGSATLCTSCPKGAYLLAQACVSSCPQGTWPSVRSGSCENCTEACAICSGADLCKKCQMQPGHPLFLHEGRCYSKCPEGSYAEDGICERCSSPCRTCEGNATNCHSCEGGHVLHHGVCQENCPERHVAVKGVCKHCPEMCQDCIHEKTCKECTPEFFLHDDMCHQSCPRGFYADSRHCVPCHKDCLECSGPKADDCELCLESSWVLYDGLCLEECPAGTYYEKETKECRDCHKSCLTCSSSGTCTTCQKGLIMNPRGSCMANEKCSPSEYWDEDAPGCKPCHVKCFHCMGPAEDQCQTCPMNSLLLNTTCVKDCPEGYYADEDSNRCAHCHSSCRTCEGRHSRQCHSCRPGWFQLGKECLLQCREGYYADNSTGRCERCNRSCKGCQGPRPTDCLSCDRFFFLLRSKGECHRSCPDHYYVEQSTQTCERCHPTCDQCKGKGALNCLSCVWSYHLMGGICTSDCLVGEYRVGEGEKFNCEKCHESCMECKGPGAKNCTLCPANLVLHMDDSHCLHCCNTSDPPSAQECCDCQDTTDECILRTSKVRPATEHFKTALFITSSMMLVLLLGAAVVVWKKSRGRVQPAAKAGYEKLADPNKSYSSYKSSYRESTSFEEDQVIEYRDRDYDEDDDDDIVYMGQDGTVYRKFKYGLLDDDDIDELEYDDESYSYYQ

SEQ ID NO: 784 - protein, 1068 aa, Homo sapiens
MGHLPTGIHGARRLLPLLWLFVLFKNATAFHVTVQDDNNIVVSLEASDVISPASVYVVKITGESKNYFFEFEEFNSTLPPPVIFKASYHGLYYIITLVVVNGNVVTKPSRSITVLTKPLPVTSVSIYDYKPSPETGVLFEIHYPEKYNVFTRVNISYWEGKDFRTMLYKDFFKGKTVFNHWLPGMCYSNITFQLVSEATFNKSTLVEYSGVSHEPKQHRTENFTEYLMVDEEAHEFVAELKEPGKYKLSVTTFSSSGSCETRKSQSAKSLSFYISPSGEWIEELTEKPQHVSVHVLSSTTALMSWTSSQENYNSTIVSVVSLTCQKQKESQRLEKQYCTQVNSSKPIIENLVPGAQYQVVIYLRKGPLIGPPSDPVTFAIVPTGIKDLMLYPLGPTAVVLSWTRPYLGVFRKYVVEMFYFNPATMTSEWTTYYEIAATVSLTASVRIANLLPAWYYNFRVTMVTWGDPELSCCDSSTISFITAPVAPEITSVEYFNSLLYISWTYGDDTTDLSHSRMLHWMVVAEGKKKIKKSVTRNVMTAILSLPPGDIYNLSVTACTERGSNTSMLRLVKLEPAPPKSLFAVNKTQTSVTLLWVEEGVADFFEVFCQQVGSSQKTKLQEPVAVSSHVVTISSLLPATAYNCSVTSFSHDSPSVPTFIAVSTMVTEMNPNVVVISVLAILSTLLIGLLLVTLIILRKKHLQMARECGAGTFVNFASLERDGKLPYNWRRSIFAFLTLLPSCLWTDYLLAFYINPWSKNGLKKRKLTNPVQLDDFDAYIKDMAKDSDYKFSLQFEELKLIGLDIPHFAADLPLNRCKNRYTNILPYDFSRVRLVSMNEEEGADYINANYIPGYNSPQEYIATQGPLPETRNDFWKMVLQQKSQIIVMLTQCNEKRRVKCDHYWPFTEEPIAYGDITVEMISEEEQDDWACRHFRINYADEMQDVMHFNYTAWPDHGVPTANAAESILQFVHMVRQQATKSKGPMIIHCSAGVGRTGTFIALDRLLQHIRDHEFVDILGLVSEMRSYRMSMVQTEEQYIFIHQCVQLMWMKKKQQFCISDVIYENVSKS

SEQ ID NO: 785 - protein, 115 aa, Homo sapiens
MGNSCYNIVATLLLVLNFERTRSLQDPCSNCPAGTFCDNNRNQICSPCPPNSFSSAGGQRTCDICRQCKGVFRTRKECSSTSNAECDCTPGFHCLGAGCSMCEQDCKQGQELTKK

SEQ ID NO: 786 - protein, 237 aa, Homo sapiens
SLTWFTTIVPLVLVITMTAVKDATDDYFRHKSDNQVNNRQSEVLINSKLQNEKWMNVKVGDIIKLENNQFVAADLLLLSSSEPHGLCYVETAELDGETNLKVRHALSVTSELGADISRLAGFDGIVVCEVPNNKLDKFMGILSWKDSKHSLNNEKIILRGCILRNTSWCFGMVIFAGPDTKLMQNSGKTKFKRTSIDRLMNTLVLWEIQSGRVKLGTNSELSSFGMKERRALCSPDS

SEQ ID NO: 787 - protein, 624 aa, Homo sapiens
VRGHVTAAQERNYGTIINIEKSSVINQLPLKIKKFILGKNPMSVLNLERASPGSHSSRHHRIHTGEKLYECSECGKGFPYNSDLSIHEKIHTGERHHECTDCGKAFTQKSTLKIHQKIHTGERSYICIECGQAFIQKTQLIAHRRIHSGEKPYECNNCGKSFISKSQLQVHQRVHTRVKPYICTEYGKVFSNNSNLITHEKIQSREKSSICTECGKAFTYRSELIIHQRIHTGEKPYECSDCGRAFTQKSALTVHQRIHTGEKSYICMKCGLAFIRKAHLITHQIIHTGEKPYKCGHCGKLFTSKSQLHVHKRIHTGEKPYVCNKCGKAFTNRSNLITHQKTHTGEKSYICSKCGKAFTQRSDLITHQRIHTGEKPYECNTCGKAFTQKSNLNIHQKIHTGERQYECHECGKAFNQKSILIVHQKIHTGEKPYVCTECGRAFIRKSNFITHQRIHTGEKPYECSDCGKSFTSKSQLLVHQPVHTGEKPYVCAECGKAFSGRSNLSKHQKTHTGEKPYICSECGKTFRQKSELITHHRIHTGEKPYECSDCGKSFTKKSQLQVHQRIHTGEKPYVCAECGKAFSNRSNLNKHQTTHTGDKPYKCGICGKGFVQKSVFSVHQSSHA

SEQ ID NO: 788 - protein, 260 aa, Homo sapiens
LRVSAELAMAQLCGLRRSRAFLALLGSLLLSGVLAADRERSIHDFCLVSKVVGRCRASMPRWWYNVTDGSCQLFVYGGCDGNSNNYLTKEECLKKCATVTENATGDLATSRNAADSSVPSAPRRQDSEDHSSDMFNYEEYCTANAVTGPCRASFPRWYFDVERNSCNNFIYGGCRGNKNSYRSEEACMLRCFRQQENPPLPLGSKVVVLAGLFVMVLILFLGASMVYLIRVARRNQERALRTVWSSGDDKEQLVKNTYVL

SEQ ID NO: 789 - protein, 53 aa, Homo sapiens
LLFLPDVDEASKKEIKDILIQYDRTLLVADPRRCESKKFGGPGARARYQKSYR

SEQ ID NO: 790 - protein, 72 aa, Homo sapiens [sequence omitted]

SEQ ID NO: 791 - protein, 1136 aa, Homo sapiens
MGALWSWWILWAGATLLWGLTQEASVDLKNTGREEFLTAFLQNYQLAYSKAYPRLLISSLSESPASVSILSQADNTSKKVTVRPGESVMVNISAKAEMIGSKIFQHAVVIHSDYAISVQALNAKPDTAELTLLRPIQALGTEYFVLTPPGTSARNVKEFAVVAGAAGASVSVTLKGSVTFNGKFYPAGDVLRVTLQPYNVAQLQSSVDLSGSKVTASSPVAVLSGHSCAQKHTTCNHVVEQLLPTSAWGTHYVVPTLASQSRYDLAFVVASQATKLTYNHGGITGSRGLQAGDVVEFEVRPSWPLYLSANVGIQVLLFGTGAIRNEVTYDPYLVLIPDVAAYCPAYVVKSVPGCEGVALVVAQTKAISGLTIDGHAVGAKLTWEAVPGSEFSYAEVELGTADMIHTAEATTNLGLLTFGLAKAIGYATAADCGRTVLSPVEPSCEGMQCAAGQRCQVVGGKAGCVAESTAVCRAQGDPHYTTFDGRRYDMMGTCSYTMVELCSEDDTLPAFSVEAKNEHRGSRRVSYVGLVTVRAYSHSVSLTRGEVGFVLVDNQRSRLPVSLSEGRLRVYQSGPRAVVELVFGLVVTYDWDCQLALSLPARFQDQVCGLCGNYNGDPADDFLTPDGALAPDAVEFASSWKLDDGDYLCEDGCQNNCPACTPGQAQHYEGDRLCGMLTKLDGPFAVCHDTLDPRPFLEQCVYDLCVVGGERLSLCRGLSAYAQACLELGISVGDWRSPANCPLSCPANSRYELCGPACPTSCNGAAAPSNCSGRPCVEGCVCLPGFVASGGACVPASSCGCTFQGLQLAPGQEVWADELCQRRCTCNGATHQVTCRDKQSCPAGERCSVQNGLLGCYPDRFGTCQGSGDPHYVSFDGRRFDFMGTCTYLLVGSCGQNAALPAFRVLVENEHRGSQTVSYTRAVRVEARGVKVAVRREYPGQVLVDDVLQYLPFQAADGQVQVFRQGRDAVVRTDFGLTVTYDWNARVTAKVPSSYAEALCGLCGNFNGDPADDLALRGGGQAANALAFGNSWQEETRPGCGATEPGDCPKLDSLVAQQLQSKNECGILADPKGPFRECHSKLDPQGAVRDCVYDRCLLPGQSGPLCDALATYAAACQAAGATVHPWRSEELCPRGL

SEQ ID NO: 792 - protein, 149 aa, Homo sapiens
LAARRPHVTVKDVNQQEFVRALAAFLKKSGKLKVPEWVDTVKLAKHKELAPYDENWFYTRAASTARHLYLRGGAGVGSMTKIYGGRQRNGVMPSHFSRGSKSVARRVLQALEGLKMVEKDQDGGRKLTPQGQRDLDRIAGQVAAANKKH

SEQ ID NO: 793 - protein, 199 aa, Homo sapiens
MDPARKAGAQAMIWTAGWLLLLLLRGGAQALECYSCVQKADDGCSPNKMKTVKCAPGVDVCTEAVGAVETIHGQFSLAVRGCGSGLPGKNDRGLDLHGLLAFIQLQQCAQDRCNAKLNLTSRALDPAGPWGPGRSCGGGATFGPAKIEVEPWQRREYSTWAGGGVTLWGGAKRQQEGLSGCRRREVARWGGATSRRGHR

SEQ ID NO: 794 - protein, 92 aa, Homo sapiens
MDPARKAGAQAMIWTAGWLLLLLLRGGAQALECYSCVQKADDGCSPNKMKTVKCAPGVDVCTEAVGAVETSEWGPPGHAHHCRLLRPSPASL

SEQ ID NO: 795 - protein, 30 aa, Homo sapiens
LASQPSVSKTQAARVPASRIQASGICATRT

SEQ ID NO: 796 - protein, 258 aa, Homo sapiens
LDVALVPALYALCRYRPASQSSNSPQRSPDRGRAPRRTHVTSRRRHSLEAFPAHPSPFSLSGPGRAGGAIMGVDIRHNKDRKVRRKEPKSQDIYLRLLVKLYRFLARRTNSTFNQVVLKRLFMSRTNRPPLSLSRMIRKMKLPGRENKTAVVVGTITDDVRVQEVPKLKVCALRVTSRARSRILRAGGKILTFDQLALDSPKGCGTVLLSGPRKGREVYRHFGKAPGTPHSHTKPYVRSKGRKFERARGRRASRGYKN

SEQ ID NO: 797 - protein, 181 aa, Homo sapiens
MGVDIRHNKDRKVRRKEPKSQDIYLRLLVKLYRFLARRTNSTFNQVVLKRLFMSRTNRPPLSLSRMVSGWSREHGRPGSRWVLSVWKGGRTWSSGSNQGIKGLSQPVASVELGLLVGTECPWAVGKSPGPPLLLFVRWRCPGGFRRLPQVITEFYVKGSAEGGPIEQSAFFFLSGAFPSWT

SEQ ID NO: 798 - protein, 150 aa, Homo sapiens
LFASLSLFPALPIRIPVAVCISCLCPHVCPQVRFSEKVTVHFLAVWAGPAQAARQGPWEQLARDRSRFARRITQAQEELSPCLTPAARARAWARLRNPPLAPIPALTQTLPSSSVPSSPVQTTPLSQAVATPSRSSAAAAAALDLSGRRG

SEQ ID NO: 799 - protein, 56 aa, Homo sapiens
VVGPSGGSALLSLSLPLGRKVVVVRCEGINISGNFYRNKCKLGPGRSTGEGLPVGC

SEQ ID NO: 800 - protein, 191 aa, Homo sapiens
VVGPSGGSALLSLSLPLGRKVVVVRCEGINISGNFYRNKLKYLAFLRKRMNTNPSRGPYHFRAPSRIFWRTVRGMLPHKTKRGQAALDRLKVFDGIPPPYDKKKRMVVPAALKVVRLKPTRKFAYLGRLAHEVGWKYQAVTATLEEKRKEKAKIHYRKKKQLMRLRKQAEKNVEKKIDKYTEVLKTHGLLV

SEQ ID NO: 801 - protein, 160 aa, Homo sapiens
MGVPRPQPWALGLLLFLLPGSLGAESHLSLLYHLTAVSSPAPGTPAFWVSGWLGPQQYLSYNSLRGEAEPCGAWVWENQVSWYWEKETTDLRIKEKLFLEAFKALGGKGEIPVWRGKGPGPCSGAPLTCVWAPQVPTLCRACWAVNWALTTPRCPPPSSP

SEQ ID NO: 802 - protein, 235 aa, Homo sapiens
MGVPRPQPWALGLLLFLLPGSLGAESHLSLLYHLTAVSSPAPGTPAFWVSGWLGPQQYLSYNSLRGEAEPCGAWVWENQVSWYWEKETTDLRIKEKLFLEAFKALGGKGPYTLQGLLGCELGPDNTSVPTAKFALNGEEFMNFDLKQGTWGGDWPEALAISQRWQQQDKAANKELTFLLFSCPHRLREHLERGRGNLEWKGCWTKIDTSWGCAQIFIPSATKEKLRLNQSPPPCA

SEQ ID NO: 803 - protein, 185 aa, Homo sapiens
MGVPRPQPWALGLLLFLLPGSLGAEPPSMRLKARPSSPGFSVLTCSAFSFYPPELQLRFLRNGLAAGTGQGDFGPNSDGSFHASSSLTVKSGDEHHYCCIVQHAGLAQPLRVELGEVPPGGDAPGFPLPCLTAAPVLPESDLPPHCCHLLESDCLEPHACQCPQNLMACPSQGQLPSVSCCFWPH

SEQ ID NO: 804 - protein, 202 aa, Homo sapiens
LGLLLFLLPGSLGAESHLSLLYHLTAVSSPAPGTPAFWVSGWLGPQQYLSYNSLRGEAEPCGAWVWENQVSWYWEKETTDLRIKEKLFLEAFKALGGKGPYTLQGLLGCELGPDNTSVPTAKFALNGEEFMNFDLKQGTWGGDWPEALAISQRWQQQDKAANKELTFLLFSCPHRLREHLERGRGNLEWKEPKARQIFCAWI

SEQ ID NO: 805 - protein, 325 aa, Homo sapiens
MSPPLLLLPLLLLLPLLNVEPAGATLIRIPLRQVHPGRRTLNLLRGWGKPAELPKLGAPSPGDKPASVPLSKFLDAQYFGEIGLGTPPQNFTVAFDTGSSNLWVPSRRCHFFSVPCWFHHRFNPNASSSFKPSGTKFAIQYGTGRVDGILSEDKLTIGGIKGASVIFGEALWESSLVFTVSRPDGILGLGFPILSVEGVRPPLDVLVEQGLLDKPVFSFYFNRDPEVADGGELVLGGSDPAHYIPPLTFVPVTVPAYWQIHMERVKVGSRLTLCAQGCAAILDTGTPVIVGPTEEIRALHAAIGGIPLLAGEVRSQSLVGVSWGR

SEQ ID NO: 806 - protein, 527 aa, Homo sapiens
VEMPGPCSEGFVQGRDVGELQEPGLPGELPPKENNSTGKVFQAVMLERHEIHDIQDFYFREMQQNIHDFECQCHNDERNYREIPAIKIKNITGRRDQGDGRNAGNKPVENQLELSFWLHLAELQGFQIERKIYECNQIEKSVTRGSSVSLLQTNLPCVNTSISNIYRNDFMHPSLLTQDQKAYIREKPYKCSDCGKAFNQRSNLTTHQRIHTGQKPHKCDICGKGFRRIANLASHHRIHTGEKPYRCNECGKTFNQTFNLTTHQRIHTGQKPYKCDRCGKGFRQIGNLASHHRIHTGEKPYRCNECGKTFNRMFHLTRHQRIHTGQKPYKCDICGKGFRQIANLASHHRIHTGEKPYKCSDCGKTFNYRSHLTRHQRIHTGQKPYKCDTCGKDFSQNSYLENHQRIHTREKSYRCNECGKTFNKMTNLTTHQRIHTGQKTYKCDICGKGFRQIGNLASHHRIHTGEKPYRCNECGKTFNRMFHLTRHQRIHTGQKPYKCDICGKSFSQNSYLENHQRIHTGEKTYKL

SEQ ID NO: 807 - protein, 157 aa, Homo sapiens
LGIFLTGASLPVLCLAQTIHTQEEDLPRPSISAEPGTVIPLGSHVTFVCRGPVGVQTFRLERDSRSTYNDTEDVSQASPSESEARFRIDSKALEARTPRTQSPAPQLVSSRALSWRGLQGNLCCGCCSGSSPLPWAWSQGLGRPREGTDTHQALGGR

SEQ ID NO: 808 - protein, 103 aa, Homo sapiens
LGIFLTGASLPVLCLAQTIHTQEEDLPRPSISAEPGTVIPLGSHVTFVCRGPVGVQTFRLERDSRSTYNDTEDVSQASPSESEARFRIDSVRKEMPGLSLHLL

SEQ ID NO: 809 - protein, 372 aa, Homo sapiens
LPNRSGTMAPKLITVLCLGFCLNQKICPHAGAQDKFSLSAWPSPVVPLGGRVTLSCHSHLRFVIWTIFQTTGTRSHELHTGLSNNITISPVTPEHAGTYRCVGIYKHASKWSAESNSLKIIVTGLFTKPSISAHPSSLVHAGARVSLRCHSELAFDEFILYKEGHIQHSQQLDQGMEAGIHYVEAVFSMGPVTPAHAGAYRCCGCFSHSRYEWSAPSDPLDIVITGKYKKPSLSTQVDPMMRLGEKLTLFCSSEISFDQYHLFRHGVAHGQWLSGGQRHREAFQANFSVGRATPVPGGTYRCYGSFNDSPYKPPVTRCNFTPQETLRVLLCHSQNPPLNLTPPWQTQSPRKANGRMKRSLQQKRHRRSYMPS

SEQ ID NO: 810 - protein, 352 aa, Homo sapiens
MAPKLITVLCLGFCLNQKICPHAGAQDKFSLSAWPSPVVPLGGRVTLSCHSHLRFVIWTIFQTTGTRSHELHTGLSNNITISPVTPEHAGTYRCVGIYKHASKWSAESNSLKIIVTGLFTKPSISAHPSSLVHAGARVSLRCHSELAFDEFILYKEGHIQHSQQLDQGMEAGIHYVEAVFSMGPVTPAHAGAYRCCGCFSHSRYEWSAPSDPLDIVITGKYKKPSLSTQVDPMMRLGEKLTLFCSSEISFDQYHLFRHGVAHGQWLSGGQRHREAFQANFSVGRATPVPGGTYRCYGSFNDSPYKPPVTRCNFTPQETLRVLLCHSQNPPLNLTHLALKDSPATCICSLDSQ

SEQ ID NO: 811 - protein, 225 aa, Homo sapiens
VPPPHLQRGRSGLEPGTFRKMAAARPSLGRVLPGSSVLFLCDMQEKFRHNIAYFPQIVSVAARMLKVARLLEVPVMLTEQYPQGLGPTVPELGTEGLRPLAKTCFSMVPALQQELDSRPQLRSVLLCGIEAQACILNTTLDLLDRGLQVHVVVDACSSRSQVDRLVALARMRQSGAFLSTSEGLILQLVGDAVHPQFKEIQKLIKEPAPDSGLLGLFQGQNSLLH

SEQ ID NO: 812 - protein, 13 aa, Homo sapiens
LLCISFLLMCGAS

SEQ ID NO: 813 - protein, 518 aa, Homo sapiens
LVPRDLWGPGRRRPRPSQRTGRGGNREVPGGVHGGVPGGLRKAPAEAPALRLKIARGPAASLGRGKAQPMGRVGGMAQPMGRAGAPKPMGRAGSARRGRFKGCWSEGSPVHPVPAVLSWLLALLRCASTMLSLRVPLAPITDPQQLQLSPLKGLSLVDKENTPPALSGTRVLASKTARRIFQEPTEPKTKAAAPGVEDEPLLRENPRRFVIFPIEYHDIWQMYKKAEASFWTAEEVDLSKDIQHWESLKPEERYFISHVLAFFAASDGIVNENLVERFSQEVQITEARCFYGFQIAMENIHSEMYSLLIDTYIKDPKEREFLFNAIETMPCVKKKADWALRWIGDKEATYGERVVAFAAVEGIFFSGSFASIFWLKKRGLMPGLTFSNELISRDEGLHCDFACLMFKHLVHKPSEERVREIIINAVRIEQEFLTEALPVKLIGMNCTLMKQYIEFVADRLMLELGFSKVFRVENPFDFMENISLEGKTNFFEKRVGEYQRMGVMSSPTENSFTLDADF

SEQ ID NO: 814 - protein, 108 aa, Homo sapiens
VHPVPAVLSWLLALLRCASTMLSLRVPLAPITDPQQLQLSPLKGLSLVDKENTVSPRGGRCGQGREAGKAKPLLTHTRLPAAAGPERDPRPGQQDREEDLPGAHGAEN

SEQ ID NO: 815 - protein, 144 aa, Homo sapiens
VHPVPAVLSWLLALLRCASTMLSLRVPLAPITDPQQLQLSPLKGLSLVDKENTPPALSGTRVLASKTARRIFQEPTEPKTKAAAPGVEDEPLLRENPRRFVIFPIEYHDIWQMYKKAEASFWTAEEVIGGPQKTPAGVTVTPQT

SEQ ID NO: 816 - protein, 183 aa, Homo sapiens
VHPVPAVLSWLLALLRCASTMLSLRVPLAPITDPQQLQLSPLKGLSLVDKENTPPALSGTRVLASKTARRIFQEPTEPKTKAAAPGVEDEPLLRENPRRFVIFPIEYHDIWQMYKKAEASFWTAEEVDLSKDIQHWESLKPEERYFISHVLAFFAASDGIVNENLVSFQNIFHSFDVDDLRSN

SEQ ID NO: 817 - protein, 203 aa, Homo sapiens
LSWLLALLRCASTMLSLRVPLAPITDPQQLQLSPLKGLSLVDKENTPPALSGTRVLASKTARRIFQEPTEPKTKAAAPGVEDEPLLRENPRRFVIFPIEYHDIWQMYKKAEASFWTAEEVDLSKDIQHWESLKPEERYFISHVLAFFAASDGIVNENLVERFSQEVQITEARCFYGFQIAMENIHSEMYSLLIDTYIKDPKER

SEQ ID NO: 818 - protein, 138 aa, Homo sapiens
LPSELLGVRSCQAFLLGCRRWVGAGVSGGQGRTWGPLLWMVPPRDSEAHFHSGRMRGRSLNPATIYPVLPKLLSLLPLSCQKRLHCRSYGQDHLDTGLFPEKPRNGVLGDSRDKEAMALDGTAYQGSSSTCILQETSL

SEQ ID NO: 819 - protein, 19 aa, Homo sapiens
LTCMIMEMVYLMLKMSLVF

SEQ ID NO: 820 - protein, 371 aa, Homo sapiens
LFTSAYLISELEAARMLCVNAPPKKAQEGGGSEVFQELKGICIALGMSKPPANITMFQFFSGIEKKLKETLAKVPPNHVGKPLLKKPMGPAHWSQTEKLAKVYQPKRSVLSPKTTISVAHLLAARQDLSKILRTSSGSIREKTACAINKVLMGRVPDRGGRPNEIEPPPPEMPPWQKRQDGPQQQTGGRGGGRGGYEHSSYGGRGGHEQGGGRGGRGGYDHGGRGGGRGNKHQGGWTDGGSGGGGGYQDGGYRDSGFQPGGYHGGHSSGGYQGGGYGGFQTSSSYTGSGYQGGGYQQDNRYQDGGHHGDRGGGRGGRGGRGGRGGRAGQGGGWGGRGSQNYHQGGQFEQHFQHGGYQYNHSGFGQGRHYTS

SEQ ID NO: 821 - protein, 377 aa, Homo sapiens
VTASGPGNPLPDRLGEMAGGRHRRVVGTLHLLLLVAALPWASRGVSPSASAWPEEKNYHQPAILNSSALRQIAEGTSISEMWQNDLQPLLIERYPGSPGSYAARQHIMQRIQRLQADWVLEIDTFLSQTPYGYRSFSNIISTLNPTAKRHLVLACHYDSKYFSHWNNRVFVGATDSAVPCAMMLELARALDKKLLSLKTVSDSKPDLSLQLIFFDGEEAFLHWSPQDSLYGSRHLAAKMASTPHPPGARGTSQLHGMDLLVLLDLIGAPNPTFPNFFPNSARWFERLQAIEHELHELGLLKDHSLEGRYFQNYSYGGVIQDDHIPFLRRGVPVLHLIPSPFPEVWHTMDDNEENLDESTIDNLNKILQVFVLEYLHL

SEQ ID NO: 822 - protein, 580 aa, Homo sapiens
VSRPGCGFLLTSCPRQRSQFLLGAGCPAPLETAPPRSMGTSLSPNDPWPLNPLSIQQTTLLLLLSVLATVHVGQRLLRQRRRQLRSAPPGPFAWPLIGNAAAVGQAAHLSFARLARRYGDVFQIRLGSCPIVVLNGERAIHQALVQQGSAFADRPAFASFRVVSGGRSMAFGHYSEHWKVQRRAAHSMMRNFFTRQPRSRQVLEGHVLSEARELVALLVRGSADGAFLDPRPLTVVAVANVMSAVCFGCRYSHDDPEFRELLSHNEEFGRTVGAGSLVDVMPWLQYFPNPVRTVFREFEQLNRNFSNFILDKFLRHCESLRPGAAPRDMMDAFILSAEKKAAGDSHGGGARLDLENVPATITDIFGASQDTLSTALQWLLLLFTRYPDVQTRVQAELDQVVGRDRLPCMGDQPNLPYVLAFLYEAMRFSSFVPVTIPHATTANTSVLGYHIPKDTVVFVNQWSVNHDPLKWPNPENFDPARFLDKDGLINKDLTSRVMIFSVGKRRCIGEELSKMQLFLFISILAHQCDFRANPNEPAKMNFSYGLTIKPKSFKVNVTLRESMELLDSAVQNLQAKETCQ

SEQ ID NO: 823 - protein, 320 aa, Homo sapiens
LTWLIPYMASQVRQLQEDAARLQAAYAGDKADDIQKRENEVLEAWKSLLDACESRRVRLVDTGDKFRFFSMVRDLMLWMEDVIRQIEAQEKPRDVSSVELLMNNHQGIKAEIDARNDSFTTCIELGKSLLARKHYASEEIKEKLLQLTEKRKEMIDKWEDRWEWLRLILEVHQFSRDASVAEAWLLGQEPYLSSREIGQSVDEVEKLIKRHEAFEKSAATWDERFSALERLTTLELLEVRRQQEEEERKRRPPSPEPSTKVSEEAESQQQWDTSKGEQVSQNGLPAEQGSPRVSYRSQTYQNYKNFNSRRTASDQPWSGL

SEQ ID NO: 824 - protein, 23 aa, Homo sapiens
VWTLHPLLLPLLLLPVAGGSPWG

SEQ ID NO: 825 - protein, 271 aa, Homo sapiens
VPAPPAENRSMEGGLGRAVCLLTGASRGFGRTLAPLLASLLSPGSVLVLSARNDEALRQLEAELGAERSGLRVVRVPADLGAEAGLQQLLGALRELPRPKGLQRLLLINNAGSLGDVSKGFVDLSDSTQVNNYWALNLTSMLCLTSSVLKAFPDSPGLNRTVVNISSLCALQPFKGWALYCAGKAARDMLFQVLALEEPNVRVLNYAPGPLDTDMQQLARETSVDPDMRKGLQELKAKGKLVDCKVSAQKLLSLLEKDEFKSGAHVDFYDK

SEQ ID NO: 826 - protein, 366 aa, Homo sapiens
VARARASLPAQSPARSMAATSLMSALAARLLQPAHSCSLRLRPFHLAAVRNEAVVISGRKLAQQIKQEVRQEVEEWVASGNKRPHLSVILVGENPASHSYVLNKTRAAAVVGINSETIMKPASISEEELLNLINKLNNDDNVDGLLVQLPLPEHIDERRICNAVSPDKDVDGFHVINVGRMCLDQYSMLPATPWGVWEIIKRTGIPTLGKNVVVAGRSKNVGMPIAMLLHTDGAHERPGGDATVTISHRYTPKEQLKKHTILADIVISAAGIPNLITADMIKEGAAVIDVGINRVHDPVTAKPKLVGDVDFEGVRQKAGYITPVPGGVGPMTVAMLMKNTIIAAKKVLRLEEREVLKSKELGVATN

SEQ ID NO: 827 - protein, 102 aa, Homo sapiens
MAATSLMSALAARLLQPAHSCSLRLRPFHLAAVRNEAVVISGRKLAQQIKQEVRQEVEEWVASGNKRPHLSVILVGENPASHSYVLNKTRAAAVVGNPSRGG

SEQ ID NO: 828 - protein, 962 aa, Homo sapiens
LCAVRTPSSRPGSRAPAQSSRTAPPASPLASPPRFPNSAPSGRGRMIASHLLAYFFTELNHDQVQKVDQYLYHMRLSDETLLEISKRFRKEMEKGLGATTHPTAAVKMLPTFVRSTPDGTEHGEFLALDLGGTNFRVLWVKVTDNGLQKVEMENQIYAIPEDIMRGSGTQLFDHIAECLANFMDKLQIKDKKLPLGFTFSFPCHQTKLDESFLVSWTKGFKSSGVEGRDVVALIRKAIQRRGDFDIDIVAVVNDTVGTMMTCGYDDHNCEIGLIVGTGSNACYMEEMRHIDMVEGDEGRMCINMEWGAFGDDGSLNDIRTEFDQEIDMGSLNPGKQLFEKMISGMYMGELVRLILVKMAKEELLFGGKLSPELLNTGRFETKDISDIEGEKDGIRKAREVLMRLGLDPTQEDCVATHRICQIVSTRSASLCAATLAAVLQRIKENKGEERLRSTIGVDGSVYKKHPHFAKRLHKTVRRLVPGCDVRFLRSEDGSGKGAAMVTAVAYRLADQHRARQKTLEHLQLSHDQLLEVKRRMKVEMERGLSKETHASAPVKMLPTYVCATPDGTEKGDFLALDLGGTNFRVLLVRVRNGKWGGVEMHNKIYAIPQEVMHGTGDELFDHIVQCIADFLEYMGMKGVSLPLGFTFSFPCQQNSLDESILLKWTKGFKASGCEGEDVVTLLKEAIHRREEFDLDVVAVVNDTVGTMMTCGFEDPHCEVGLIVGTGSNACYMEEMRNVELVEGEEGRMCVNMEWGAFGDNGCLDDFRTEFDVAVDELSLNPGKQRFEKMISGMYLGEIVRNILIDFTKRGLLFRGRISERLKTRGIFETKFLSQIESDCLALLQVRAILQHLGLESTCDDSIIVKEVCTVVARRAAQLCGAGMAAVVDRIRENRGLDALKVTVGVDGTLYKLHPHFAKVMHETVKDLAPKCDVSFLQSEDGSGKGAALITAVACRIREAGQR

SEQ ID NO: 829 - protein, 234 aa, Homo sapiens
VLAVHLNTLLGERPVQHREVQGNESDLFMSYFPRGLKYQEGGVESAFHKTSTGAPAAIKKLYQVKGKKNIRATERALNWDSFNTGDCFILDLGQNIFAWCGGKSNILERNKARDLALAIRDSERQGKAQVEIVTDGEEPAEMIQVLGPKPALKEGNPEEDLTADKANAQAAALYKVSDATGQMNLTKVADSSPFALELLISDDCFVLDNGLCGKIYIWKVFQKRLDEFKRAKSE

SEQ ID NO: 830 - protein, 815 aa, Homo sapiens
LWRLCGAAALAGVGSWCEALMATMLEGRCQTQPRSSPSGREASLWSSGFGMKLEAVTPFLGKYRPFVGRCCQTCTPKSWESLFHRSITDLGFCNVILVKEENTRFRGWLVRRLCYFLWSLEQHIPPCQDVPQKIMESTGVQNLLSGRVPGGTGEGQVPDLVKKEVQRILGHIQAPPRPFLVRLFSWALLRFLNCLFLNVQLHKGQMKMVQKAAQAGLPLVLLSTHKTLLDGILLPFMLLSQGLGVLRVAWDSRACSPALRALLRKLGGLFLPPEASLSLDSSEGLLARAVVQAVIEQLLVSGQPLLIFLEEPPGALGPRLSALGQAWVGFVVQAVQVGIVPDALLVPVAVTYDLVPDAPCDIDHASAPLGLWTGALAVLRSLWSRWGCSHRICSRVHLAQPFSLQEYIVSARSCWGGRQTLEQLLQPIVLGQCTAVPDTEKEQEWTPITGPLLALKEEDQLLVRRLSCHVLSASVGSSAVMSTAIMATLLLFKHQKLLGEFSWLTEEILLRGFDVGFSGQLRSLLQHSLSLLRAHVALLRIRQGDLLVVPQPGPGLTHLAQLSAELLPVFLSEAVGACAVRGLLAGRVPPQGPWELQGILLLSQNELYRQILLLMHLLPQDLLLLKPCQSSYCYCQEVLDRLIQCGLLVAEETPGSRPACDTGRQRLSRKLLWKPSGDFTDSDSDDFGEADGRYFRLSQQSHCPDFFLFLCRLLSPLLKAFAQAAAFLRQGQLPDTELGYTEQLFQFLQATAQEEGIFECADPKLAISAVWTFRDLGVLQQTPSPAGPRLHLSPTFASLDNQEKLEQFIRQFICS

SEQ ID NO: 831 - protein, 744 aa, Homo sapiens
LWRLCGAAALAGVGSWCEALMATMLEGRCQTQPRSSPSGREASLWSSGFGMKLEAVTPFLGKYRPFVGRCCQTCTPKSWESLFHRSITDLGFCNVILVKEENTRFRGWLVRRLCYFLWSLEQHIPPCQDVPQKIMESTGVQNLLSGRVPGGTGEGQVPDLVKKEVQRILGHIQAPPRPFLVRLFSWALLRFLNCLFLNVQLHKGQMKMVQKAAQAGLPLVLLSTHKTLLDGILLPFMLLSQGLGVLRVAWDSRACSPALRALLRKLGGLFLPPEASLSLDSSEGLLARAVVQAASAPLGLWTGALAVLRSLWSRWGCSHRICSRVHLAQPFSLQEYIVSARSCWGGRQTLEQLLQPIVLGQCTAVPDTEKEQEWTPITGPLLALKEEDQLLVRRLSCHVLSASVGSSAVMSTAIMATLLLFKHQKLLGEFSWLTEEILLRGFDVGFSGQLRSLLQHSLSLLRAHVALLRIRQGDLLVVPQPGPGLTHLAQLSAELLPVFLSEAVGACAVRGLLAGRVPPQGPWELQGILLLSQNELYRQILLLMHLLPQDLLLLKPCQSSYCYCQEVLDRLIQCGLLVAEETPGSRPACDTGRQRLSRKLLWKPSGDFTDSDSDDFGEADGRYFRLSQQSHCPDFFLFLCRLLSPLLKAFAQAAAFLRQGQLPDTELGYTEQLFQFLQATAQEEGIFECADPKLAISAVWTFRDLGVLQQTPSPAGPRLHLSPTFASLDNQEKLEQFIRQFICS

SEQ ID NO: 832 - protein, 750 aa, Homo sapiens
MATMLEGRCQTQPRSSPSGREASLWSSGFGMKLEAVTPFLGKYRPFVGRCCQTCTPKSWESLFHRSITDLGFCNVILVKEENTRFRGWLVRRLCYFLWSLEQHIPPCQDVPQKIMESTGVQNLLSGRVPGGTGEGQVPDLVKKEVQRILGHIQAPPRPFLVRLFSWALLRFLNCLFLNVQLHKGQMKMVQKAAQAGLPLVLLSTHKTLLDGILLPFMLLSQGLGVLRVAWDSRACSPALRALLRKLGGLFLPPEASLSLDSSEGLLARAVVQAVIEQLLVSGQPLLIFLEEPPGALGPRLSALGQAWVGFVVQAVQVGIVPDALLVPVAVTYDLVPDAPCDIDHASAPLGLWTGALAVLRSLWSRWGCSHRICSRVHLAQPFSLQEYIVSARSCWGGRQTLEQLLQPIVLGQCTAVPDTEKEQEWTPITGPLLALKEEDQLLVRRLSCHVLSASVGSSAVMSTAIMATLLLFKHQKGVFLSQLLGEFSWLTEEILLRGFDVGFSGQLRSLLQHSLSLLRAHVALLRIRQGDLLVVPQPGPGLTHLAQLSAELLPVFLSEAVGACAVRGLLAGRVPPQGPWELQGILLLSQNELYRQILLLMHLLPQDLLLLKPCQSSYCYCQEVLDRLIQCGLLVAEETPGSRPACDTGRQRLSRKLLWKPSGDFTDSDSDDFGEADGRYFRVCFKKLPLEGGGREAVGSCTHPGLSPPAQPAVTLPRFLSFPLPPAQPAAQGLCTGCRLPPPGPAARYW

SEQ ID NO: 833 - protein, 194 aa, Homo sapiens [sequence omitted]

SEQ ID NO: 834 - protein, 95 aa, Homo sapiens
LVCSLLELCVQRRCRCRRRRRRRRRRRRRHYHHLILAATLRTLPHCDRIIAVFGSLRSRRHRLGALSWPLFPQMSDSDSRTEKRKKKRPNGKATF

SEQ ID NO: 835 - protein, 12 aa, Homo sapiens
LKTLLIWLTWQG

SEQ ID NO: 836 - protein, 30 aa, Homo sapiens
LSRLTAGAWNLHTLLGLCISAGAGFSSEPP

SEQ ID NO: 837 - protein, 16 aa, Homo sapiens
MPRRACGSGVIFSLLL

SEQ ID NO: 838 - protein, 769 aa, Homo sapiens
LARGWILLSLCLGCFPPSERFMKYLLNFIGQGPATYGPFCAERLRRTYANGVRAEPPTWLELQAVKSKKHIPIQVILATGESLTVPVDSASTSREMCMHIAHKQGLSDHLGFSLQVAVYDKFWSLGSGRDHMMDAIARCEQMAQERGESQRQSPWRIYFRKEFFTPWHDSREDPVSTELIYRQVLRGVWSGEYSFEKEEELVELLARHCYVQLGASAESKAVQELLPSCIPHKLYRTKPPDRWASLVTAACAKAPYTQKQVTPLAVREQVVDAARLQWPLLFSRLFEVITLSGPRLPKTQLILAVNWKGLCFLDQQEKMLLELSFPEVMGLATNREAQGGQRLLLSTMHEEYEFVSPSSVAIAELVALFLEGLKERSIFAMALQDRKATDDTTLLAFKKGDLLVLTKKQGLLASENWTLGQNDRTGKTGLVPMACLYTIPTVTKPSAQLLSLLAMSPEKRKLAAQEGQFTEPRPEEPPKEKLHTLEEFSYEFFRAPEKDMVSMAVLPLARARGHLWAYSCEPLRQPLLKRVHANVDLWDIACQIFVAILRYMGDYPSRQAWPTLELTDQIFTLALQHPALQDEVYCQILKQLTHNSNRHSEERGWQLLWLCTGLFPPSKGLLPHAQKFIDTRRGKLLAPDCSRRIQKVLRTGPRKQPPHQVEVEAAEQNVSRICHKIYFPNDTSEMLEVVANTRVRDVCDSIATRLQLASWEGCSLFIKISDKVGRAGAGQTVGGRAVSEALGAACGGLSLPGAPMLDQAARPGLLGQR

SEQ ID NO: 839 - protein, 379 aa, Homo sapiens
LKHSEAGGNLFRMSKRSWWAGSRKPPREMLKLSGSDSSQSMNGLEVAPPGLITNFSLATAEQCGQETPLENMLFASFYLLDFILALVGNTLALWLFIRDHKSGTPANVFLMHLAVADLSCVLVLPTRLVYHFSGNHWPFGEIACRLTGFLFYLNMYASIYFLTCISADRFLAIVHPVKSLKLRRPLYAHLACAFLWVVVAVAMAPLLVSPQTVQTNHTVVCLQLYREKASHHALVSLAVAFTFPFITTVTCYLLIIRSLRQGLRVEKRLKTKAVRMIAIVLAIFLVCFVPYHVNRSVYVLHYRSHGASCATQRILALANRITSCLTSLNGALDPIMYFFVAEKFRHALCNLLCGKRLKGPPPSFEGKTNESSLSAKSEL

SEQ ID NO: 840 - protein, 77 aa, Homo sapiens
LFPTIHGNDEVKRGVLLMLFGGVPKTTGEGTSLRGDINVCIVGDPSTAKSQFLKFPKSQRTSLWSNINISAREMVLE

SEQ ID NO: 841 - protein, 512 aa, Homo sapiens
VESEQFFEFLTLRSGLYIFKEFLRGSWRDSGSQTLHWDPSCFREQLVMEPSSLELPADTVQRIAAELKCHPTDERVALHLDEEDKLRHFRECFYIPKIQDLPPVDLSLVNKDENAIYFLGNSLGLQPKMVKTYLEEELDKWAKIAAYGHEVGKRPWITGDESIVGLMKDIVGANEKEIALMNALTVNLHLLMLSFFKPTPKRYKILLEAKAFPSDHYAIESQLQLHGLNIEESMRMIKPREGEETLRIEDILEVIEKEGDSIAVILFSGVHFYTGQHFNIPAITKAGQAKGCYVGFDLAHAVGNVELYLHDWGVDFACWCSYKYLNAGAGGIAGAFIHEKHAHTIKPALVGWFGHELSTRFKMDNKLQLIPGVCGFRISNPPILLVCSLHASLEIFKQATMKALRKKSVLLTGYLEYLIKHNYGKDKAATKKPVVNIITPSHVEERGCQLTITFSVPNKDVFQELEKRGVVCDKRNPNGIRVAPVPLYNSFHDVYKFTNLLTSILDSAETKN

SEQ ID NO: 842 - protein, 1878 aa, Homo sapiens
LRQLRMRTGWATPRRPAGLLMLLFWFFDLAEPSGRAANDPFTIVHGNTGKCIKPVYGWIVADDCDETEDKLWKWVSQHRLFHLHSQKCLGLDITKSVNELRMFSCDSSAMLWWKCEHHSLYGAARYRLALKDGHGTAISNASDVWKKGGSEESLCDQPYHEIYTRDGNSYGRPCEFPFLIDGTWHHDCILDEDHSGPWCATTLNYEYDRKWGICLKPENGCEDNWEKNEQFGSCYQFNTQTALSWKEAYVSCQNQGADLLSINSAAELTYLKEKEGIAKIFWIGLNQLYSARGWEWSDHKPLNFLNWDPDRPSAPTIGGSSCARMDAESGLWQSFSCEAQLPYVCRKPLNNTVELTDVWTYSDTRCDAGWLPNNGFCYLLVNESNSWDKAHAKCKAFSSDLISIHSLADVEVVVTKLHNEDIKEEVWIGLKNINIPTLFQWSDGTEVTLTYWDENEPNVPYNKTPNCVSYLGELGQWKVQSCEEKLKYVCKRKGEKLNDASSDKMCPPDEGWKRHGETCYKIYEDEVPFGTNCNLTITSRFEQEYLNDLMKKYDKSLRKYFWTGLRDVDSCGEYNWATVGGRRRAVTFSNWNFLEPASPGGCVAMSTGKSVGKWEVKDCRSFKALSICKKMSGPLGPEEASPKPDDPCPEGWQSFPASLSCYKVFHAERIVRKRNWEEAERFCQALGAHLSSFSHVDEIKEFLHFLTDQFSGQHWLWIGLNKRSPDLQGSWQWSDRTPVSTIIMPNEFQQDYDIRDCAAVKVFHRPWRRGWHFYDDREFIYLRPFACDTKLEWVCQIPKGRTPKTPDWYNPDRAGIHGPPLIIEGSEYWFVADLHLNYEEAVLYCASNHSFLATITSFVGLKAIKNKIANISGDGQKWWIRISEWPIDDHFTYSRYPWHRFPVTFGEECLYMSAKTWLIDLGKPTDCSTKLPFICEKYNVSSLEKYSPDSAAKVQCSEQWIPFQNKCFLKIKPVSLTFSQASDTCHSYGGTLPSVLSQIEQDFITSLLPDMEATLWIGLRWTAYEKINKWTDNRELTYSNFHPLLVSGRLRIPENFFEEESRYHCALILNLQKSPFTGTWNFTSCSERHFVSLCQKYSEVKSRQTLQNASETVKYLNNLYKIIPKTLTWHSAKRECLKSNMQLVSITDPYQQAFLSVQALLHNSSLWIGLFSQDDELNFGWSDGKRLHFSRWAETNGQLEDCVVLDTDGFWKTVDCNDNQPGAICYYSGNETEKEVKPVDSVKCPSPVLNTPWIPFQNCCYNFIITKNRHMATTQDEVHTKCQKLNPKSHILSIRDEKENNFVLEQLLYFNYMASWVMLGITYRNKSLMWFDKTPLSYTHWRAGRPTIKNEKFLAGLSTDGFWDIQTFKVIEEAVYFHQHSILACKIEMVDYKEEYNTTLPQFMPYEDGIYSVIQKKVTWYEALNMCSQSGGHLASVHNQNGQLFLEDIVKRDGFPLWVGLSSHDGSESSFEWSDGSTFDYIPWKGQTSPGNCVLLDPKGTWKHEKCNSVKDGAICYKPTKSKKLSRLTYSSRCPAAKENGSRWIQYKGHCYKSDQALHSFSEAKKLCSKHDHSATIVSIKDEDENKFVSRLMRENNNITMRVWLGLSQHSVDQSWSWLDGSEVTFVKWENKSKSGVGRCSMLIASNETWKKVECEHGFGRVVCKVPLDCPSSTWIQFQDSCYIFLQEAIKVESIEDVRNQCTDHGADMISIHNEEENAFILDTLKKQWKGPDDILLGMFYDTDDASFKWFDNSNMTFDKWTDQDDDEDLVDTCAFLHIKTGEWKKGNCEVSSVEGTLCKTAIPYKRKYLSDNHILISALVIASTVILTVLGAIIWFLYKKHSDSRFTTVFSTAPQSPYNEDCVLVVGEENEYPVQFD

SEQ ID NO: 843 - protein, 1822 aa, Homo sapiens
LRQLRMRTGWATPRRPAGLLMLLFWFFDLAEPSGRAANDPFTIVHGNTGKCIKPVYGWIVADDCDETEDKLWKWVSQHRLFHLHSQKCLGLDITKSVNELRMFSCDSSAMLWWKCEHHSLYGAARYRLALKDGHGTAISNASDVWKKGGSEESLCDQPYHEIYTRDGNSYGRPCEFPFLIDGTWHHDCILDEDHSGPWCATTLNYEYDRKWGICLKPENGCEDNWEKNEQFGSCYQFNTQTALSWKEAYVSCQNQGADLLSINSAAELTYLKEKEGIAKIFWIGLNQLYSARGWEWSDHKPLNFLNWDPDRPSAPTIGGSSCARMDAESGLWQSFSCEAQLPYVCRKPLNNTVELTDVWTYSDTRCDAGWLPNNGFCYLLVNESNSWDKAHAKCKAFSSDLISIHSLADVEVVVTKLHNEDIKEEVWIGLKNINIPTLFQWSDGTEVTLTYWDENEPNVPYNKTPNCVSYLGELGQWKVQSCEEKLKYVCKRKGEKLNDASSDKMCPPDEGWKRHGETCYKIYEDEVPFGTNCNLTITSRFEQEYLNDLMKKYDKSLRKYFWTGLRDVDSCGEYNWATVGGRRRAVTFSNWNFLEPASPGGCVAMSTGKSVGKWEVKDCRSFKALSICKKMSGPLGPEEASPKPDDPCPEGWQSFPASLSCYKVFHAERIVRKRNWEEAERFCQALGAHLSSFSHVDEIKEFLHFLTDQFSGQHWLWIGLNKRSPDLQGSWQWSDRTPVSTIIMPNEFQQDYDIRDCAAVKVFHRPWRRGWHFYDDREFIYLRPFACDTKLEWVCQIPKGRTPKTPDWYNPDRAGIHGPPLIIEGSEYWFVADLHLNYEEAVLYCASNHSFLATITSFVGLKAIKNKIANISGDGQKWWIRISEWPIDDHFTYSRYPWHRFPVTFGEECLYMSAKTWLIDLGKPTDCSTKLPFICEKYNVSSLEKYSPDSAAKVQCSEQWIPFQNKCFLKIKPVSLTFSQASDTCHSYGGTLPSVLSQIEQDFITSLLPDMEATLWIGLRWTAYEKINKWTDNRELTYSNFHPLLVSGRLRIPENFFEEESRYHCALILNLQKSPFTGTWNFTSCSERHFVSLCQKYSEVKSRQTLQNASETVKYLNNLYKIIPKTLTWHSAKRECLKSNMQLVSITDPYQQAFLSVQALLHNSSLWIGLFSQDDELNFGWSDGKRLHFSRWAETNGQLEDCVVLDTDGFWKTVDCNDNQPGAICYYSGNETEKEVKPVDSVKCPSPVLNTPWIPFQNCCYNFIITKNRHMATTQDEVHTKCQKLNPKSHILSIRDEKENNFVLEQLLYFNYMASWVMLGITYRNKSLMWFDKTPLSYTHWRAGRPTIKNEKFLAGLSTDGFWDIQTFKVIEEAVYFHQHSILACKIEMVDYKEEYNTTLPQFMPYEDGIYSVIQKKVTWYEALNMCSQSGGHLASVHNQNGQLFLEDIVKRDGFPLWVGLSSHDGSESSFEWSDGSTFDYIPWKGQTSPGNCVLLDPKGTWKHEKCNSVKDGAICYKPTKSKKLSRLTYSSRCPAAKENGSRWIQYKGHCYKSDQALHSFSEAKKLCSKHDHSATIVSIKDEDENKFVSRLMRENNNITMRVWLGLSQHSVDCPSSTWIQFQDSCYIFLQEAIKVESIEDVRNQCTDHGADMISIHNEEENAFILDTLKKQWKGPDDILLGMFYDTDDASFKWFDNSNMTFDKWTDQDDDEDLVDTCAFLHIKTGEWKKGNCEVSSVEGTLCKTAIPYKRKYLSDNHILISALVIASTVILTVLGAIIWFLYKKHSDSRFTTVFSTAPQSPYNEDCVLVVGEENEYPVQFD

SEQ ID NO: 844 - protein, 1727 aa, Homo sapiens
LRQLRMRTGWATPRRPAGLLMLLFWFFDLAEPSGRAANDPFTIVHGNTGKCIKPVYGWIVADDCDETEDKLWKWVSQHRLFHLHSQKCLGLDITKSVNELRMFSCDSSAMLWWKCEHHSLYGAARYRLALKDGHGTAISNASDVWKKGGSEESLCDQPYHEIYTRDGNSYGRPCEFPFLIDGTWHHDCILDEDHSGPWCATTLNYEYDRKWGICLKPENGCEDNWEKNEQFGSCYQFNTQTALSWKEAYVSCQNQGADLLSINSAAELTYLKEKEGIAKIFWIGLNQLYSARGWEWSDHKPLNFLNWDPDRPSAPTIGGSSCARMDAESGLWQSFSCEAQLPYVCRKPLNNTVELTDVWTYSDTRCDAGWLPNNGFCYLLVNESNSWDKAHAKCKAFSSDLISIHSLADVEVVVTKLHNEDIKEEVWIGLKNINIPTLFQWSDGTEVTLTYWDENEPNVPYNKTPNCVSYLGELGQWKVQSCEEKLKYVCKRKGEKLNDASSDKMCPPDEGWKRHGETCYKIYEDEVPFGTNCNLTITSRFEQEYLNDLMKKYDKSLRKYFWTGLRDVDSCGEYNWATVGGRRRAVTFSNWNFLEPASPGGCVAMSTGKSVGKWEVKDCRSFKALSICKKMSGPLGPEEASPKPDDPCPEGWQSFPASLSCYKVFHAERIVRKRNWEEAERFCQALGAHLSSFSHVDEIKEFLHFLTDQFSGQHWLWIGLNKRSPDLQGSWQWSDRTPVSTIIMPNEFQQDYDIRDCAAVKVFHRPWRRGWHFYDDREFIYLRPFACDTKLEWVCQIPKGRTPKTPDWYNPDRAGIHGPPLIIEGSEYWFVADLHLNYEEAVLYCASNHSFLATITSFVGLKAIKNKIANISGDGQKWWIRISEWPIDDHFTYSRYPWHRFPVTFGEECLYMSAKTWLIDLGKPTDCSTKLPFICEKYNVSSLEKYSPDSAAKVQCSEQWIPFQNKCFLKIKPVSLTFSQASDTCHSYGGTLPSVLSQIEQDFITSLLPDMEATLWIGLRWTAYEKINKWTDNRELTYSNFHPLLVSGRLRIPENFFEEESRYHCALILNLQKSPFTGTWNFTSCSERHFVSLCQKYSEVKSRQTLQNASETVKYLNNLYKIIPKTLTWHSAKRECLKSNMQLVSITDPYQQAFLSVQALLHNSSLWIGLFSQDDELNFGWSDGKRLHFSRWAETNGQLEDCVVLDTDGFWKTVDCNDNQPGAICYYSGNETEKEVKPVDSVKCPSPVLNTPWIPFQNCCYNFIITKNRHMATTQDEVHTKCQKLNPKSHILSIRDEKENNFVLEQLLYFNYMASWVMLGITYRNKSLMWFDKTPLSYTHWRAGRPTIKNEKFLAGLSTDGFWDIQTFKVIEEAVYFHQHSILACKIEMVDYKEEYNTTLPQFMPYEDGIYSVIQKKVTWYEALNMCSQSGGHLASVHNQNGQLFLEDIVKRDGFPLWVGLSSHDGSESSFEWSDGSTFDYIPWKGQTSPGNCVLLDPKGTWKHEKCNSVKDGAICYKPTKSKKLSRLTYSSRCPAAKENGSRWIQYKGHCYKSDQALHSFSEAKKLCSKHDHSATIVSIKDEDENKFVSRLMRENNNITMRVWLGLSQHSVDQSWSWLDGSEVTFVKWENKSKSGVGRCSMLIASNETWKKVECEHGFGRVVCKVPLGPDYTAIAIIVATLSILVLMGGLIWFLFQRHRLHLAGFSSVRYAQGVNEDEIMLPSFHD

SEQ ID NO: 845 - protein, 102 aa, Homo sapiens
LGIFLILCFQRMQGVVNRLSKLLKPGGMLLFRDYGRYDKTQLRFKKGHCLSENFYVRGDGTRAYFFTKGEVHSMFCKASLDEKQNLVDRRLQVNRKKQVKMH

SEQ ID NO: 846 - protein, 99 aa, Homo sapiens
LILRTKVLRMLKLFMTLLFGGKGKGSPSHRKHIGSINPNCNVLEVIKDGYENARRLCDLYYINSPELELEELNECNESHYGTPCQQRCLPPYSSSCHAG

SEQ ID NO: 847 - protein, 10 aa, Homo sapiens
LLLLLLLWDR

SEQ ID NO: 848 - protein, 655 aa, Homo sapiens
LSALAHPARVGRGGARAQGVQIAGPGLTGSGWELPAHAVPRGGSRGGGRGHGLIAVCALHSVPHSPPTTCLAERTPCRRPAEMLRLPTVFRQMRPVSRVLAPHLTRAYAKDVKFGADARALMLQGVDLLADAVAVTMGPKGRTVIIEQSWGSPKVTKDGVTVAKSIDLKDKYKNIGAKLVQDVANNTNEEAGDGTTTATVLARSIAKEGFEKISKGANPVEIRRGVMLAVDAVIAELKKQSKPVTTPEEIAQVATISANGDKEIGNIISDAMKKVGRKGVITVKDGKTLNDELEIIEGMKFDRGYISPYFINTSKGQKCEFQDAYVLLSEKKISSIQSIVPALEIANAHRKPLVIIAEDVDGEALSTLVLNRLKVGLQVVAVKAPGFGDNRKNQLKDMAIATGGAVFGEEGLTLNLEDVQPHDLGKVGEVIVTKDDAMLLKGKGDKAQIEKRIQEIIEQLDVTTSEYEKEKLNERLAKLSDGVAVLKVGGTSDVEVNEKKDRVTDALNATRAAVEEGIVLGGGCALLRCIPALDSLTPANEDQKIGIEIIKRTLKIPAMTIAKNAGVEGSLIVEKIMQSSSEVGYDAMAGDFVNMVEKGIIDPTKVVRTALLDAAGVASLLTTAEVVVTEIPKEEKDPGMGAMGGMGGGMGGGMF

SEQ ID NO: 849 - protein, 200 aa, Homo sapiens
VCALHSVPHSPPTTCLAERTPCRRPAEMLRLPTVFRQMRPVSRVLAPHLTRAYAKDVKFGADARALMLQGVDLLADAVAVTMGPKGRTVIIEQSWGSPKVTKDGVTVAKSIDLKDKYKNIGAKLVQDVANNTNEEAGDGTTTATVLARSIAKEGFEKISKGANPVEIRRGVMLAVDAVIAELKKQSKPVTTPEEIAQVRT

SEQ ID NO: 850 - protein, 115 aa, Homo sapiens
LRRALGANRGARRGDRPPSLGGARGLAATAGASAPARWVIFSRVARAGLRVSLRRYTRAEYESEAEGVMGGEIQPVSVKVGDKVLLPEYGGTKVVLDDKDYFLFRDGDILGKYVD

SEQ ID NO: 851 - protein, 76 aa, Homo sapiens
LTLKLVWLLTGGATTTPNRRKESGIKLGILGGEIQPVSVKVGDKVLLPEYGGTKVVLDDKDYFLFRDGDILGKYVD

SEQ ID NO: 852 - protein, 535 aa, Homo sapiens
LAGPGMTSSLQRPWRVPWLPWTILLVSTAAASQNQERLCAFKDPYQQDLGIGESRISHENGTILCSKGSTCYGLWEKSKGDINLVKQGCWSHIGDPQECHYEECVVTTTPPSIQNGTYRFCCCSTDLCNVNFTENFPPPDTTPLSPPHSFNRDETIIIALASVSVLAVLIVALCFGYRMLTGDRKQGLHSMNMMEAAASEPSLDLDNLKLLELIGRGRYGAVYKGSLDERPVAVKVFSFANRQNFINEKNIYRVPLMEHDNIARFIVGDERVTADGRMEYLLVMEYYPNGSLCKYLSLHTSDWVSSCRLAHSVTRGLAYLHTELPRGDHYKPAISHRDLNSRNVLVKNDGTCVISDFGLSMRLTGNRLVRPGEEDNAAISEVGTIRYMAPEVLEGAVNLRDCESALKQVDMYALGLIYWEIFMRCTDLFPGESVPEYQMAFQTEVGNHPTFEDMQVLVSREKQRPKFPEAWKENSLAVRSLKETIEDCWDQDAEARLTAQCAEERMAELMMIWERNKSVSPTVNPMSTAMQNERR

SEQ ID NO: 853 - protein, 1043 aa, Homo sapiens
LAGPGMTSSLQRPWRVPWLPWTILLVSTAAASQNQERLCAFKDPYQQDLGIGESRISHENGTILCSKGSTCYGLWEKSKGDINLVKQGCWSHIGDPQECHYEECVVTTTPPSIQNGTYRFCCCSTDLCNVNFTENFPPPDTTPLSPPHSFNRDETIIIALASVSVLAVLIVALCFGYRMLTGDRKQGLHSMNMMEAAASEPSLDLDNLKLLELIGRGRYGAVYKGSLDERPVAVKVFSFANRQNFINEKNIYRVPLMEHDNIARFIVGDERVTADGRMEYLLVMEYYPNGSLCKYLSLHTSDWVSSCRLAHSVTRGLAYLHTELPRGDHYKPAISHRDLNSRNVLVKNDGTCVISDFGLSMRLTGNRLVRPGEEDNAAISEVGTIRYMAPEVLEGAVNLRDCESALKQVDMYALGLIYWEIFMRCTDLFPGESVPEYQMAFQTEVGNHPTFEDMQVLVSREKQRPKFPEAWKENSLAVRSLKETIEDCWDQDAEARLTAQCAEERMAELMMIWERNKSVSPTVNPMSTAMQNERNLSHNRRVPKIGPYPDYSSSSYIEDSIHHTDSIVKNISSEHSMSSTPLTIGEKNRNSINYERQQAQARIPSPETSVTSLSTNTTTTNTTGLTPSTGMTTISEMPYPDETNLHTTNVAQSIGPTPVCLQLTEEDLETNKLDPKEVDKNLKESSDENLMEHSLKQFSGPDPLSSTSSSLLYPLIKLAVEATGQQDFTQTANGQACLIPDVLPTQIYPLPKQQNLPKRPTSLPLNTKNSTKEPRLKFGSKHKSNLKQVETGVAKMNTINAAEPHVVTVTMNGVAGRNHSVNSHAATTQYANGTVLSGQTTNIVTHRAQEMLQNQFIGEDTRLNINSSPDEHEPLLRREQQAGHDEGVLDRLVDRRERPLEGGRTNSNNNNSNPCSEQDVLAQGVPSTAADPGPSKPRRAQRPNSLDLSATNVLDGSSIQIGESTQDGKSGSGEKIKKRVKTPYSLKRWRPSTWVISTESLDCEVNNNGSNRAVHSKSSTAVYLAEGGTATTMVSKDIGMNCL

SEQ ID NO: 854 - protein, 173 aa, Homo sapiens
LFLANMKSGLWYFFLFCLRIKVLTGEINGSANYEMFIFHNGGVQILCKYPDIVQQFKMQLLKGGQILCDLTKTKGSGNTVSIKSLKFCHSQLSNNSVSFFLYNLDHSHANYYFCNLSIFDPPPFKVTLTGGYLHIYESQLCCQLKFWLPIGCAAFVVVCILGCILICWLTKKM

SEQ ID NO: 855 - protein, 204 aa, Homo sapiens
LFLANMKSGLWYFFLFCLRIKVLTGEINGSANYEMFIFHNGGVQILCKYPDIVQQFKMQLLKGGQILCDLTKTKGSGNTVSIKSLKFCHSQLSNNSVSFFLYNLDHSHANYYFCNLSIFDPPPFKVTLTGGYLHIYESQLCCQLKFWLPIGCAAFVVVCILGCILICWLTKKKYSSSVHDPNGEYMFMRAVNTAKKSRLTDVTL

SEQ ID NO: 856 - protein, 77 aa, Homo sapiens
VELSDTADTMGFGDLKSPAGLQVLNDYLADKSYIEGYVPSQADVAVFEAVSSPPPADLCHALRWYNHIKSYEKEKAR

SEQ ID NO: 857 - protein, 234 aa, Homo sapiens
VELSDTADTMGFGDLKSPAGLQVLNDYLADKSYIEGYVPSQADVAVFEAVSSPPPADLCHALRWYNHIKSYEKEKASLPGVKKALGKYGPADVEDTTGSGATDSKDDDDIDLFGSDDEEESEEAKRLREERLAQYESKKAKKPALVAKSSILLDVKPWDDETDMAKLEECVRSIQADGLVWGSSKLVPVGYGIKKLQIQCVVEDDKVGTDMLEEQITAFEDYVQSMDVAAFNKI

SEQ ID NO: 858 - protein, 90 aa, Homo sapiens
VGRPQFARSLSAAPQLSDTADTMGFGDLKSPAGLQVLNDYLADKSYIEGYVPSQADVAVFEAVSSPPPADLCHALRWYNHIKSYEKEKAR

SEQ ID NO: 859 - protein, 185 aa, Homo sapiens
LSRFIEVKMSKKISGGSVVEMQGDEMTRIIWELIKEKLIFPYVELDLHSYDLGIENRDATNDQVTKDAAEAIKKHNVGVKCATITPDEKRVEEFKLKQMWKSPNGTIRNILGGTVFREAIICKNIPRLVSGWVKPIIIGRHAYGDQVSHVGNNVILHVFFFMAQKFPTCMCFILIFWYLHPLSKV

SEQ ID NO: 860 - protein, 104 aa, Homo sapiens
LRTWCRRCCLPLALNPVPAAMAPGQLALFSVSDKTGLVEFARNLTALGLNLVASGGTAKALRDAGLAVRDVSELTGFPEMLGGRVKTLHPAVHAELLPAISIPL

SEQ ID NO: 861 - protein, 580 aa, Homo sapiens
LGLRLCSSGSSAAHRRRRKAAAPAGDQEASGSWQGLPGDAPQPHSRPESPGRQGWKGRGEGQLWPLGKDRLACSRPKSEHLDDRCLQDAGAGETRPATAPCISAEALGSPACLLKTRKEWLKPESRLLIPAGQRECISVHVGQAGVQMGNACWELYCLEHGIQPDGQMPSDKTIGGGDDSFTTFFCETGAGKHVPRAVFVDLEPTVIDEIRNGPYRQLFHPEQLITGKEDAANNYARGHYTIGKEIIDPVLDRIRKLSDQCTGLQGFLVFHSFGGGTGSGFTSLLMERLSVDYGKKSKLEFSIYPAPQVSTAVVEPYNSILTTHTTLEHSDCAFMVDNEAIYDICRRNLDIERPTYTNLNRLISQIVSSITASLRFDGALNVDLTEFQTNLVPYPRIHFPLATYAPVISAEKAYHEQLSVAEITNACFEPANQMVKCDPRHGKYMACCLLYRGDVVPKDVNAAIAAIKTKRSIQFVDWCPTGFKVGINYQPPTVVPGGDLAKVQRAVCMLSNTTAIAEAWARLDHKFDLMYAKRAFVHWYVGEGMEEGEFSEAREDMAALEKDYEEVGIDSYEDEDEGEE

SEQ ID NO: 862 - protein, 70 aa, Homo sapiens
LFFELKTMCCTKSLLLAALMSVLLLHLCGESEASNFDCCLGYTDRILHPKFIVGFTRQLANEGCDINAIM

SEQ ID NO: 863 - protein, 102 aa, Homo sapiens
LFFELKTMCCTKSLLLAALMSVLLLHLCGESEASNFDCCLGYTDRILHPKFIVGFTRQLANEGCDINAIIFHTKKKLSVCANPKQTWVKYIVRLLSKKVKNM

SEQ ID NO: 864 - protein, 103 aa, Homo sapiens
LFFELKTMCCTKSLLLAALMSVLLLHLCGESEAASNFDCCLGYTDRILHPKFIVGFTRQLANEGCDINAIIFHTKKKLSVCANPKQTWVKYIVRLLSKKVKNM

SEQ ID NO: 865 - protein, 676 aa, Homo sapiens
LQSGLALGYWLGPMLGTLRAMEGEDVEDDQLLQKLRASRRRFQRRMQRLIEKYNQPFEDTPVVQMATLTYETPQGLRIWGGRLIKERNEGEIQCAGNRAGRDVRVTPLPSLASPAVPAPGYCSRISRKSPGDPAKPASSPREWDPLHPSSTDMALVPRNDSLSLQETSSSSFLSSQPFEDDDICNVTISDLYAGMLHSMSRLLSTKPSSIISTKTFIMQNWNSRRRHRYKSRMNKTYCKGARRSQRSSKENFIPCSEPVKGTGALRDCKNVLDVSCRKTGLKLEKAFLEVNRPQIHKLDPSWKERKVTPSKYSSLIYFDSSATYNLDEENRFRTLKWLISPVKIVSRPTIRQGHGENRQREIEIRFDQLHREYCLSPRNQPRRMCLPDSWAMNMYRGGPASPGGLQGLETRRLSLPSSKAKAKSLSEAFENLGKRSLEAGRCLPKSDSSSSLPKTNPTHSATRPQQTSDLHVQGNSSGIFRKSVSPSKTLSVPDKEVPGHGRNRYDEIKEEFDKLHQKYCLKSPGQMTVPLCIGVSTDKASMEVRYQTEGFLGKLNPDPHFQGFQKLPSSPLGCRKSLLGSTAIEAPSSTCVARAITRDGTRDHQFPAKRPRLSEPQGSGRQGNSLGASDGVDNTVRPGDQGSSSQPNSEERGENTSYRMEEKSDFMLEKLETKSV

SEQ ID NO: 866 - protein, 707 aa, Homo sapiens
LQSGLALGYWLGPMLGTLRAMEGEDVEDDQLLQKLRASRRRFQRRMQRLIEKYNQPFEDTPVVQMATLTYETPQGLRIWGGRLIKERNEGEIQPAVPQSPLKNELRRKYLTQVDILLQGAEYFECAGNRAGRDVRVTPLPSLASPAVPAPGYCSRISRKSPGDPAKPASSPREWDPLHPSSTDMALVPRNDSLSLQETSSSSFLSSQPFEDDDICNVTISDLYAGMLHSMSRLLSTKPSSIISTKTFIMQNWNSRRRHRYKSRMNKTYCKGARRSQRSSKENFIPCSEPVKGTGALRDCKNVLDVSCRKTGLKLEKAFLEVNRPQIHKLDPSWKERKVTPSKYSSLIYFDSSATYNLDEENRFRTLKWLISPVKIVSRPTIRQGHGENRQREIEIRFDQLHREYCLSPRNQPRRMCLPDSWAMNMYRGGPASPGGLQGLETRRLSLPSSKAKAKSLSEAFENLGKRSLEAGRCLPKSDSSSSLPKTNPTHSATRPQQTSDLHVQGNSSGIFRKSVSPSKTLSVPDKEVPGHGRNRYDEIKEEFDKLHQKYCLKSPGQMTVPLCIGVSTDKASMEVRYQTEGFLGKLNPDPHFQGFQKLPSSPLGCRKSLLGSTAIEAPSSTCVARAITRDGTRDHQFPAKRPRLSEPQGSGRQGNSLGASDGVDNTVRPGDQGSSSQPNSEERGENTSYRMEEKSDFMLEKLETKSV

SEQ ID NO: 867 - protein, 761 aa, Homo sapiens
LQSGLALGYWLGPMLGTLRAMEGEDVEDDQLLQKLRASRRRFQRRMQRLIEKYNQPFEDTPVVQMATLTYETPQGLRIWGGRLIKERNEGEIQDSSMKPADRTDGSVQAAAWGPELPSHRTVLGADSKSGEVDATSDQEESVAWALAPAVPQSPLKNELRRKYLTQVDILLQGAEYFECAGNRAGRDVRVTPLPSLASPAVPAPGYCSRISRKSPGDPAKPASSPREWDPLHPSSTDMALVPRNDSLSLQETSSSSFLSSQPFEDDDICNVTISDLYAGMLHSMSRLLSTKPSSIISTKTFIMQNWNSRRRHRYKSRMNKTYCKGARRSQRSSKENFIPCSEPVKGTGALRDCKNVLDVSCRKTGLKLEKAFLEVNRPQIHKLDPSWKERKVTPSKYSSLIYFDSSATYNLDEENRFRTLKWLISPVKIVSRPTIRQGHGENRQREIEIRFDQLHREYCLSPRNQPRRMCLPDSWAMNMYRGGPASPGGLQGLETRRLSLPSSKAKAKSLSEAFENLGKRSLEAGRCLPKSDSSSSLPKTNPTHSATRPQQTSDLHVQGNSSGIFRKSVSPSKTLSVPDKEVPGHGRNRYDEIKEEFDKLHQKYCLKSPGQMTVPLCIGVSTDKASMEVRYQTEGFLGKLNPDPHFQGFQKLPSSPLGCRKSLLGSTAIEAPSSTCVARAITRDGTRDHQFPAKRPRLSEPQGSGRQGNSLGASDGVDNTVRPGDQGSSSQPNSEERGENTSYRMEEKSDFMLEKLETKSV

SEQ ID NO: 868 - protein, 81 aa, Homo sapiens
MFSLISFSHVFIKDICKLPKDEGTCRDFILKWYYDPNTKSCARFWYGGCGGNENKFGSQKECEKVCAPVLAKPGVISVMGT

SEQ ID NO: 869 - protein, 7 aa, Homo sapiens
VLIYLLL

SEQ ID NO: 870 - protein, 172 aa, Homo sapiens
MMKMKTFMMICFHLINTVTFVPVSKVSGQAEVDDILAAVRPTTRLVTIMLANNETGIVMPVPEISQRIKALNQERVAAGLPPILVHTDAAQALGKQRVDVEDLGVDFLTIVGHKFYGPRIGALYIRGLGEFTPLYPMLFGGGQERNFRPGTENTPMIAGLGKVSPGELEEMS

SEQ ID NO: 871 - protein, 131 aa, Homo sapiens
VRVRRRRAEVLGRAVEPPPGRCWSTPPVAPPARSASAAAMGVQVETISPGDGMLEDGKKFDSSRDRNKPFKFMLGKQEVIRGWEEGVAQMSVGQRAKLTISPDYAYGATGHPGIIPPHATLVFDVELLKLE

SEQ ID NO: 872 - protein, 199 aa, Homo sapiens
LEGFGLCLWVVTLSLLIWPQDDDAVPPGMESLISAPLVKTLEKEEEKDLVMYSKCQRLFRSPSMPCSVIRPILKRLERPQDRDTPVQNKRRRSVTPPEEQQEAEEPKARVLRSKSLCHDEIENLLDSDHRELIGDYSKVVPWVSDPRGASQLPWEPELNLKAKAGLPPTDSRRKAPRPQVHLTRNDGGPIDGQVQQHRG

SEQ ID NO: 873 - protein, 1226 aa, Homo sapiens
VPAARGAAMRSPRTRGRSGRPLSLLLALLCALRAKVCGASGQFELEILSMQNVNGELQNGNCCGGARNPGDRKCTRDECDTYFKVCLKEYQSRVTAGGPCSFGSGSTPVIGGNTFNLKASRGNDRNRIVLPFSFAWPRSYTLLVEAWDSSNDTVQPDSIIEKASHSGMINPSRQWQTLKQNTGVAHFEYQIRVTCDDYYYGFGCNKFCRPRDDFFGHYACDQNGNKTCMEGWMGPECNRAICRQGCSPKHGSCKLPGDCRCQYGWQGLYCDKCIPHPGCVHGICNEPWQCLCETNWGGQLCDKDLNYCGTHQPCLNGGTCSNTGPDKYQCSCPEGYSGPNCEIAEHACLSDPCHNRGSCKETSLGFECECSPGWTGPTCSTNIDDCSPNNCSHGGTCQDLVNGFKCVCPPQWTGKTCQLDANECEAKPCVNAKSCKNLIASYYCDCLPGWMGQNCDININDCLGQCQNDASCRDLVNGYRCICPPGYAGDHCERDIDECASNPCLNGGHCQNEINRFQCLCPTGFSGNLCQLDIDYCEPNPCQNGAQCYNRASDYFCKCPEDYEGKNCSHLKDHCRTTPCEVIDSCTVAMASNDTPEGVRYISSNVCGPHGKCKSQSGGKFTCDCNKGFTGTYCHENINDCESNPCRNGGTCIDGVNSYKCICSDGWEGAYCETNINDCSQNPCHNGGTCRDLVNDFYCDCKNGWKGKTCHSRDSQCDEATCNNGGTCYDEGDAFKCMCPGGWEGTTCNIARNSSCLPNPCHNGGTCVVNGESFTCVCKEGWEGPICAQNTNDCSPHPCYNSGTCVDGDNWYRCECAPGFAGPDCRININECQSSPCAFGATCVDEINGYRCVCPPGHSGAKCQEVSGRPCITMGSVIPDGAKWDDDCNTCQCLNGRIACSKVWCGPRPCLLHKGHSECPSGQSCIPILDDQCFVHPCTGVGECRSSSLQPVKTKCTSDSYYQDNCANITFTFNKEMMSPGLTTEHICSELRNLNILKNVSAEYSIYIACEPSPSANNEIHVAISAEDIRDDGNPIKEITDKIIDLVSKRDGNSSLIAAVAEVRVQRRPLKNRTDFLVPLLSSVLTVAWICCLVTAFYWCLRKRRKPGSHTHSASEDNTTNNVREQLNQIKNPIEKHGANTVPIKDYENKNSKMSKIRTHNSEVEEDDMDKHQQKARFAKQPAYTLVDREEKPPNGTPTKHPNWTNKQDNRDLESAQSLNRMEYIV

SEQ ID NO: 874 - protein, 18 aa, Homo sapiens
LLLVLTVVGVGLRFFTVS

SEQ ID NO: 875 - protein, 10 aa, Homo sapiens
MACILIIFFS

SEQ ID NO: 876 - protein, 73 aa, Homo sapiens
MIGRTRAGPGGAQVVAARWLQHHPPGPTPPSYSQTPTLASATVSSSVQWVGWTGKSLFDSCNPQSDILRKPPS

SEQ ID NO: 877 - protein, 46 aa, Homo sapiens
MKSQCYSPSYFAFFCLVFFQITSASSQTLRGHVLCRTTLRDSSAYC

SEQ ID NO: 878 - protein, 162 aa, Homo sapiens
MSDKLPYKVADIGLAAWGRKALDIAENEMPGLMRMRERYSASKPLKGARIAGCLHMTVETAVLIETLVTLGAEVRPTAVSPQSPCPPWVQPGKKTTVPGWGPSRCGADRGPGGVPPSHSVSSVSQCCHPLWCSGPAATSSPPRTMRRLPLPRLAFRVSPACF

SEQ ID NO: 879 - protein, 645 aa, Homo sapiens
VSAEFWGDIAKEFYWKTPCPGPFLRYNFDVTKGKIFIEWMKGATTNICYNVLDRNVHEKKLGDKVAFYWEGNEPGETTQITYHQLLVQVCQFSNVLRKQGIQKGDRVAIYMPMIPELVVAMLACARIGALHSIVFAGFSSESLCERILDSSCSLLITTDAFYRGEKLVNLKELADEALQKCQEKGFPVRCCIVVKHLGRAELGMGDSTSQSPPIKRSCPDVQISWNQGIDLWWHELMQEAGDECEPEWCDAEDPLFILYTSGSTGKPKGVVHTVGGYMLYVATTFKYVFDFHAEDVFWCTADIGWITGHSYVTYGPLANGATSVLFEGIPTYPDVNRLWSIVDKYKVTKFYTAPTAIRLLMKFGDEPVTKHSRASLQVLGTVGEPINPEAWLWYHRVVGAQRCPIVDTFWQTETGGHMLTPLPGATPMKPGSATFPFFGVAPAILNESGEELEGEAEGYLVFKQPWPGIMRTVYGNHERFETTYFKKFPGYYVTGDGCQRDQDGYYWITGRIDDMLNVSGHLLSTAEVESALVEHEAVAEAAVVGHPHPVKGECLYCFVTLCDGHTFSPKLTEELKKQIREKIGPIATPDYIQNAPGLPKTRSGKIMRRVLRKIAQNDHDLGDMSTVADPSVISHLFSHRCLTIQ

SEQ ID NO: 880 - protein, 67 aa, Homo sapiens
VKRMDYHYIAKSCLLCSLVPCCLPFWPFQNINAAKSSFLPEDEKRELLDLLYKAYGMPPSASAGQNL

SEQ ID NO: 881 - protein, 498 aa, Homo sapiens
LSPLAMALFGALFLALLAGAHAEFPGCKIRVTSKALELVKQEGLRFLEQELETITIPDLRGKEGHFYYNISEVKVTELQLTSSELDFQPQQELMLQITNASLGLRFRRQLLYWFFYDGGYINASAEGVSIRTGLELSRDPAGRMKVSNVSCQASVSRMHAAFGGTFKKVYDFLSTFITSGMRFLLNQQICPVLYHAGTVLLNSLLDTVPVRSSVDELVGIDYSLMKDPVASTSNLDMDFRGAFFPLTERNWSLPNRAVEPQLQEEERMVYVAFSEFFFDSAMESYFRAGALQLLLVGDKVPHDLDMLLRATYFGSIVLLSPAVIDSPLKLELRVLAPPRCTIKPSGTTISVTASVTIALVPPDQPEVQLSSMTMDARLSAKMALRGKALRTQLDLRRFRIYSNHSALESLALIPLQAPLKTMLQIGVMPMLNERTWRGVQIPLPEGINFVHEVVTNHAGFLTIGADLHFAKGLREVIEKNRPADVRASTAPTPSTAAV

SEQ ID NO: 882 - protein, 1116 aa, Homo sapiens
VSVGRAARALRAWPGARELAPSLRARPARCRRLLPRGGAAPAGGGAEAGPGGGPGGAGGAAAKAGGAADMTDNIPLQPVRQKKRMDSRPRAGCCEWLRCCGGGEARPRTVWLGHPEKRDQRYPRNVINNQKYNFFTFLPGVLFNQFKYFFNLYFLLLACSQFVPEMRLGALYTYWVPLGFVLAVTVIREAVEEIRCYVRDKEVNSQVYSRLTARGTVKVKSSNIQVGDLIIVEKNQRVPADMIFLRTSEKNGSCFLRTDQLDGETDWKLRLPVACTQRLPTAADLLQIRSYVYAEEPNIDIHNFVGTFTREDSDPPISESLSIENTLWAGTVVASGTVVGVVLYTGRELRSVMNTSNPRSKIGLFDLEVNCLTKILFGALVVVSLVMVALQHFAGRWYLQIIRFLLLFSNIIPISLRVNLDMGKIVYSWVIRRDSKIPGTVVRSSTIPEQLGRISYLLTDKTGTLTQNEMIFKRLHLGTVAYGLDSMDEVQSHIFSIYTQQSQDPPAQKGPTLTTKVRRTMSSRVHEAVKAIALCHNVTPVYESNGVTDQAEAEKQYEDSCRVYQASSPDEVALVQWTESVGLTLVGRDQSSMQLRTPGDQILNFTILQIFPFTYESKRMGIIVRDESTGEITFYMKGADVVMAGIVQYNDWLEEECGNMAREGLRVLVVAKKSLAEEQYQDFEARYVQAKLSVHDRSLKVATVIESLEMEMELLCLTGVEDQLQADVRPTLETLRNAGIKVWMLTGDKLETATCTAKNAHLVTRNQDIHVFRLVTNRGEAHLELNAFRRKHDCALVISGDSLEVCLKYYEYEFMELACQCPAVVCCRCAPTQKAQIVRLLQERTGKLTCAVGDGGNDVSMIQESDCGVGVEGKEGKQASLAADFSITQFKHLGRLLMVHGRNSYKRSAALSQFVIHRSLCISTMQAVFSSVFYFASVPLYQGFLIIGYSTIYTMFPVFSLVLDKDVKSEVAMLYPELYKDLLKGRPLSYKTFLIWVLISIYQGSTIMYGALLLFESEFVHIVAISFTSLILTELLMVALTIQTWHWLMTVAELLSLACYIASLVFLHEFIDVYFIATLSFLWKVSVITLVSCLPLYVLKYLRRRFSPPSYSKLTS

SEQ ID NO: 883 - protein, 441 aa, Homo sapiens
LGRRLECNGVISAHCNLCFLGLSDSPASASRVAGITGIMDRSKENCISGPVKATAPVGGPKRVLVTQQFPCQNPLPVNSGQAQRVLCPSNSSQRIPLQAQKLVSSHKPVQNQKQKQLQATSVPHPVSRPLNNTQKSKQPLPSAPENNPEEELASKQKNEESKKRQWALEDFEIGRPLGKGKFGNVYLAREKQSKFILALKVLFKAQLEKAGVEHQLRREVEIQSHLRHPNILRLYGYFHDATRVYLILEYAPLGTVYRELQKLSKFDEQRTATYITELANALSYCHSKRVIHRDIKPENLLLGSAGELKIADFGWSVHAPSSRRTTLCGTLDYLPPEMIEGRMHDEKVDLWSLGVLCYEFLVGKPPFEANTYQETYKRISRVEFTFPDFVTEGARDLISRLLKHNPSQRPMLREVLEHPWITANSSKPSNCQNKESASKQS

SEQ ID NO: 884 - protein, 454 aa, Homo sapiens
LSSWKTWVLGSQVGADGLECNGVISAHCNLCFLGLSDSPASASRVAGITGIMDRSKENCISGPVKATAPVGGPKRVLVTQQFPCQNPLPVNSGQAQRVLCPSNSSQRIPLQAQKLVSSHKPVQNQKQKQLQATSVPHPVSRPLNNTQKSKQPLPSAPENNPEEELASKQKNEESKKRQWALEDFEIGRPLGKGKFGNVYLAREKQSKFILALKVLFKAQLEKAGVEHQLRREVEIQSHLRHPNILRLYGYFHDATRVYLILEYAPLGTVYRELQKLSKFDEQRTATYITELANALSYCHSKRVIHRDIKPENLLLGSAGELKIADFGWSVHAPSSRRTTLCGTLDYLPPEMIEGRMHDEKVDLWSLGVLCYEFLVGKPPFEANTYQETYKRISRVEFTFPDFVTEGARDLISRLLKHNPSQRPMLREVLEHPWITANSSKPSNCQNKESASKQS

SEQ ID NO: 885 - protein, 15 aa, Homo sapiens
MQFLNWMALTCFFSC

SEQ ID NO: 886 - protein, 76 aa, Homo sapiens
VTPQAQPSLEMQNDAGEFVDLYVPRKCSASNRIIGAKDHASIQMNVAEVSWEPGRREGCDICAGKAGCPIVEEPLG

SEQ ID NO: 887 - protein, 250 aa, Homo sapiens
LPGRGHRGHSHHRHVHVQPQVLGVPVQPECLRSCHLVWVPGGASGWWRHLPGRLLCEQAQAPGLRGHQVLPVLHRCQPAGHPRLLTALPQCAHGGRHSQLRREPPARRPPEPNGSLQRCLQLPARTLQPCVRLGRPHVLLTVPRRVPCSHGDECGRPEGEWSRCLPPLSSPGPWEGAPVPSPCNRSYCWASQVYRDCSCIPQNLSSGFGHATAGKCTSTCQRKPLLLVFIFVVIFFTFLSSIPALTATLR

SEQ ID NO: 888 - protein, 331 aa, Homo sapiens
LRAALGLRSLVCALVRPPVLSTRAWPPDDAGAARAGRGSLRSLLPSAGPLRRSPQFPARTRSGPPNLRPKSGGGSGGKKMKNEIAAVVFFFTRLVRKHDKLKKEAVERFAEKLTLILQEKYKNHWYPEKPSKGQAYRCIRVNKFQRVDPDVLKACENSCILYSDLGLPKELTLWVDPCEVCCRYGEKNNAFIVASFENKDENKDEISRKVTRALDKVTSDYHSGSSSSDEETSKEMEVKPSSVTAAASPVYQISELIFPPLPMWHPLPRKKPGMYRGNGHQNHYPPPVPFGYPNQGRKNKPYRPIPVTWVPPPGMHCDRNHWINPHMLAPH

SEQ ID NO: 889 - protein, 90 aa, Homo sapiens
LAMALHVPKAPGFAQMLKEGAKHFSGLEEAVYRNIQACKELAQTTRTAYGPNGTASCCKNDCNGFSYARARSWRWHKLCSGICWSSPGIS

SEQ ID NO: 890 - protein, 304 aa, Homo sapiens
LGSSGRAPGGPKPGPPSTQVPRAPRSAMSSCSRVALVTGANRGIGLAIARELCRQFSGDVVLTARDVARGQAAVQQLQAEGLSPRFHQLDIDDLQSIRALRDFLRKEYGGLNVLVNNAAVAFKSDDPMPFDIKAEMTLKTNFFATRNMCNELLPIMKPHGRVVNISSLQCLRAFENCSEDLQERFHSETLTEGDLVDLMKKFVEDTKNEVHEREGWPNSPYGVSKLGVTVLSRILARRLDEKRKADRILVNACCPGPVKTDMDGKDSIRTVEEGAETPVYLALLPPDATEPQGQLVHDKVVQNW

SEQ ID NO: 891 - protein, 485 aa, Homo sapiens
VRRVLFLCAILWHQIKALIKKYIQRQQTINLVVVPCNVDIATTEALSMAHEVDPEGDRTIGILTKPDLMDRGTEKSVMNVVRNLTYPLKKGYMIVKCRGQQEITNRLSLAEATKKEITFFQTHPYFRVLLEEGSATVPRLAERLTTELIMHIQKSLPLLEGQIRESHQKATEELRRCGADIPSQEADKMFFLIEKIKMFNQDIEKLVEGEEVVRENETRLYNKIREDFKNWVGILATNTQKVKNIIHEEVEKYEKQYRGKELLGFVNYKTFEIIVHQYIQQLVEPALSMLQKAMEIIQQAFINVAKKHFGEFFNLNQTVQSTIEDIKVKHTAKAENMIQLQFRMEQMVFCQDQIYSVVLKKVREEIFNPLGTPSQNMKLNSHFPSNESSVSSFTEIGIHLNAYFLETSKRLANQIPFIIQYFMLRENGDSLQKAMMQILQEKNRYSWLLQEQSETATKRRILKERIYRLTQARHALCQFSSKEIH

SEQ ID NO: 892 - protein, 471 aa, Homo sapiens
VSGLYDPRLQLRFLDVTQGRLVAKPPRPARSTAEDSSTPRDMLGLRPPLLALVGLLSLGCVLSQECTKFKVSSCRECIESGPGCTWCQKLNFTGPGDPDSIRCDTRPQLLMRGCAADDIMDPTSLAETQEDHNGGQKQLSPQKVTLYLRPGQAAAFNVTFRRAKGYPIDLYYLMDLSYSMLDDLRNVKKLGGDLLRALNEITESGRIGFGSFVDKTVLPFVNTHPDKLRNPCPNKEKECQPPFAFRHVLKLTNNSNQFQTEVGKQLISGNLDAPEGGLDAMMQVAACPEEIGWRNVTRLLVFATDDGFHFAGDGKLGAILTPNDGRCHLEDNLYKRSNEFDYPSVGQLAHKLAENNIQPIFAVTSRMVKTYEKLTEIIPKSAVGELSEDSSNVVHLIKNAYNVSLPHHSAGTHGVASNLPTAGQLLLQVSRRVVWEESPCPVGQLQPPDLPSGLQDTLARHFHGELWVLSR

SEQ ID NO: 893 - protein, 72 aa, Homo sapiens
VSGLYDPRLQLRFLDVTQGRLVAKPPRPARSTAEDSSTPRDMLGLRPPLLALVGLLSLGCGEFCVPRRGLHA

SEQ ID NO: 894 - protein, 129 aa, Homo sapiens
MATLSFVFLLLGAVSWPPASASGQEFWPGQSAADILSGAASRRRYLLYDVNPPEGFNLRRDVYIRIASLLKTLLKTEEWVLVLPPWGRLYHWQSPDIHQVRIPWSEFFDLPSLNKNIPVIEYEQFIAGP

SEQ ID NO: 895 - protein, 139 aa, Homo sapiens
MATLSFVFLLLGAVSWPPASASGQEFWPGQSAADILSGAASRRRYLLYDVNPPEGFNLRRDVYIRIASLLKTLLKTEEWVLVLPPWGRLYHWQSPDIHQVRIPWSEFFDLPSLNKNIPVIEYEQFIAEDGFGVMRRPGV

SEQ ID NO: 896 - protein, 1365 aa, Homo sapiens
LQRGGPSGCTAAEEAASRGADGPGESMAPRCPWPWPRRRRLLDVLAPLVLLLGVRAASAEPERISEEVGLLQLLGDPPPQQVTQTDDPDVGLAYVFGPDANSGQVARYHFPSLFFRDFSLLFHIRPATEGPGVLFAITDSAQAMVLLGVKLSGVQDGHQDISLLYTEPGAGQTHTAASFRLPAFVGQWTHLALSVAGGFVALYVDCEEFQRMPLARSSRGLELEPGAGLFVAQAGGADPDKFQGVIAELKVRRDPQVSPMHCLDEEGDDSDGASGDSGSGLGDARELLREETGAALKPRLPAPPPVTTPPLAGGSSTEDSRSEEVEEQTTVASLGAQTLPGSDSVSTWDGSVRTPGGRVKEGGLKGQKGEPGVPGPPGRAGPPGSPCLPGPPGLPCPVSPLGPAGPALQTVPGPQGPPGPPGRDGTPGRDGEPGDPGEDGKPGDTGPQGFPGTPGDVGPKGDKGDPGVGERGPPGPQGPPGPPGPSFRHDKLTFIDMEGSGFGGDLEALRGPRGFPGPPGPPGVPGLPGEPGRFGVNSSDVPGPAGLPGVPGREGPPGFPGLPGPPGPPGREGPPGRTGQKGSLGEAGAPGHKGSKGAPGPAGARGESGLAGAPGPAGPPGPPGPPGPPGPGLPAGFDDMEGSGGPFWSTARSADGPQGPPGLPGLKGDPGVPGLPGAKGEVGADGVPGFPGLPGREGIAGPQGPKGDRGSRGEKGDPGKDGVGQPGLPGPPGPPGPVVYVSEQDGSVLSVPGPEGRPGFAGFPGPAGPKGNLGSKGERGSPGPKGEKGEPGSIFSPDGGALGPAQKGAKGEPGFRGPPGPYGRPGYKGEIGFPGRPGRPGMNGLKGEKGEPGDASLGFGMRGMPGPPGPPGPPGPPGTPVYDSNVFAESSRPGPPGLPGNQGPPGPKGAKGEVGPPGPPGQFPFDFLQLEAEMKGEKGDRGDAGQKGERGEPGGGGFFGSSLPGPPGPPGPPGPRGYPGIPGPKGESIRGQPGPPGPQGPPGIGYEGRQGPPGPPGPPGPPSFPGPHRQTISVPGPPGPPGPPGPPGTMGASSGVRLWATRQAMLGQVHEVPEGWLIFVAEQEELYVRVQNGFRKVQLEARTPLPRGTDNEVAALQPPVVQLHDSNPYPRREHPHPTARPWRADDILASPPRLPEPQPYPGAPHHSSYVHLRPARPTSPPAHSHRDFQPVLHLVALNSPLSGGMRGIRGADFQCFQQARAVGLAGTFRAFLSSRLQDLYSIVRRADRAAVPIVNLKDELLFPSWEALFSGSEGPLKPGARIFSFDGKDVLRHPTWPQKSVWHGSDPNGRRLTESYCETWRTEAPSATGQASSLLGGRLLGQSAASCHHAYIVLCIENSFMTASK

SEQ ID NO: 897 - protein, 419 aa, Homo sapiens
LGGLGAGQGGHPPVGWEGRVLGRERRVLGREGTLLWAGRAGCWGGRGGCWAGRATCCGLGGPGAGQGGHPPVGWQGRVLGREGTLLWTGRAGCWAGSVPWHRLGGAGAGQGGHPPVGWEGQVLGRESRVLGREGTLAQAQPQVLGDPAAFFQLEARTPLPRGTDNEVAALQPPVVQLHDSNPYPRREHPHPTARPWRADDILASPPRLPEPQPYPGAPHHSSYVHLRPARPTSPPAHSHRDFQPVLHLVALNSPLSGGMRGIRGADFQCFQQARAVGLAGTFRAFLSSRLQDLYSIVRRADRAAVPIVNLKDELLFPSWEALFSGSEGPLKPGARIFSFDGKDVLRHPTWPQKSVWHGSDPNGRRLTESYCETWRTEAPSATGQASSLLGGRLLGQSAASCHHAYIVLCIENSFMTASK

SEQ ID NO: 898 - protein, 282 aa, Homo sapiens
LSPQVVSVGIKDVFDFIPGSDQLNVISCQGLAPSQGRPGLSLVKENYAELLEDAFLKNVTAQICIDKKCPDYTCPITFSSPADITILLDGSASVGSHNFDTTKRFAKRLAERFLTAGRTDPAHDVRVAVVQYSGTGQQRPERASLQFLQNYTALASAVDAMDFINDATDVNDALGYVTRFYREASSGAAKKRLLLFSDGNSQGATPAAIEKAVQEAQRAGIEIFVVVVGRQVNEPHIRVLVTGKTAEYDVAYGESHLFRVPSYQALLRGVFHQTVSRKVALG

SEQ ID NO: 899 - protein, 409 aa, Homo sapiens
LELFRGAALHLHDIGIVTMDWLVRNVTYRPHCHICFTPRGIMQFRFAHPTPRPSEKCSKWILLEDYRKRVQNVTEFDDSLLRNFTLVTQHPEVIYTNQNVVWSKFETIFFTISGLIHYAPVFRDYVFRSMQEFYEDNVLYMEIRARLLPVYELSGEHHDEEWSVKTYQEVAQKFVETHPEFIGIKIIYSDHRSKDVAVIAESIRMAMGLRIKFPTVVAGFDLVGHEDTGHSLHDYKEALMIPAKDGVKLPYFFHAGETDWQGTSIDRNILDALMLNTTRIGHGFALSKHPAVRTYSWKKDIPIEVCPISNQVLKLVSDLRNHPVATLMATGHPMVISSDDPAMFGAKGLSYDFYEVFMGIGGMKADLRTLKQLAMNSIKYSTLLESEKNTFMEIWKKRWDKFIADVATK

SEQ ID NO: 900 - protein, 547 aa, Homo sapiens
LMRKLLTNLPAAAVLSAQVYSAVLQGLWEENVCGTPGRTRVCTALLYGQVCPFQDSTDGLRTITSILFNWPPENTSVYYQPPQRSSFRIKLAFRNLSWPGLGLEDHQEIVLGQLVLPEPNEAKPDDPAPRPGQHALTMPALEPAPPLLADLGPALEPESPAALGPPGYLHSAPGPAPAPGEGPPPGTVLEPQSAPESSCPCRGSVKNQPSEELPDMTTFPPRLLAEQLTLMDAELFKKVVLHECLGCIWGQGHLKGNEHMAPTVRATIAHFNRLTNCITTSCLGDHSMRARDRARVVEHWIKVARECLSLNNFSSVHVIVSALCSNPIGQLHKTWAGVSSKSMKELKELCKKDTAVKRDLLIKAGSFKVATQERNPQRVQMRLRRQKKGVVPFLGDFLTELQRLDSAIPDDLDGNTNKRSKEVRVLQEMQLLQVAAMNYRLRPLEKFVTYFTRMEQLSDKERLHCSVTISVHCNVCLLGSSPSSASQAAGTTAVHHHVRLFCCCCSATSCPASWSPKTRRLATSCSGWEPTGMLARTPALHHPSPRP

SEQ ID NO: 901 - protein, 99 aa, Homo sapiens
VDVRGPTRSLGRADRALSSQYIAVHVVPDQLMAFGGSSEPCALCSLHSIGKIGGAQNRSYSKLLCGLLAERLRISPDRVYINYYDMNAANVGWNNSTFA

SEQ ID NO: 902 - protein, 51 aa, Homo sapiens
LLTRAPPFSFGPSGRLGSLRFPTMEMILDKKQLQVVFLFEFKMGHNAAEIT

SEQ ID NO: 903 - protein, 153 aa, Homo sapiens
LRIICGRVPMSLLLPPLALLLLLAALVAPATAATAYRPDWNRLSGLTRARVETCGGQLNRLKEVKAFVTQDIPFYHNLVMKHLPGADPELVLLGRRYEELERIPLSEMTREEINALVQELGFYRKAAPDAQVPPEYVWAPAKPPEETSDHADL

SEQ ID NO: 904 - protein, 44 aa, Homo sapiens
MSLLLPPLALLLLLAALVAPATAATAYRPDWNRLSGLTRARVEA

SEQ ID NO: 905 - protein, 184 aa, Homo sapiens
LDEREKVKEGRGGGQRAIERSLSSIPEDCAMGLSDGEWQLVLNVWGKVEADIPGHGQEVLIRLFKGHPETLEKFDKFKHLKSEDEMKASEDLKKHGATVLTALGGILKKKGHHEAEIKPLAQSHATKHKIPVKYLEFISECIIQVLQSKHPGDFGADAQGAMNKALELFRKDMASNYKELGFQG

SEQ ID NO: 906 - protein, 172 aa, Homo sapiens
LAGGSARTAGEKGSCDCAMGLSDGEWQLVLNVWGKVEADIPGHGQEVLIRLFKGHPETLEKFDKFKHLKSEDEMKASEDLKKHGATVLTALGGILKKKGHHEAEIKPLAQSHATKHKIPVKYLEFISECIIQVLQSKHPGDFGADAQGAMNKALELFRKDMASNYKELGFQG

SEQ ID NO: 907 - protein, 909 aa, Homo sapiens
VLVPACPELTREMVLAQGLLSMALLALCWERSLAGAEETIPLQTLRCYNDYTSHITCRWADTQDAQRLVNVTLIRRVNEDLLEPVSCDLSDDMPWSACPHPRCVPRRCVIPCQSFVVTDVDYFSFQPDRPLGTRLTVTLTQHVQPPEPRDLQISTDQDHFLLTWSVALGSPQSHWLSPGDLEFEVVYKRLQDSWEDAAILLSNTSQATLGPEHLMPSSTYVARVRTRLAPGSRLSGRPSKWSPEVCWDSQPGDEAQPQNLECFFDGAAVLSCSWEVRKEVASSVSFGLFYKPSPDAGEEECSPVLREGLGSLHTRHHCQIPVPDPATHGQYIVSVQPRRAEKHIKSSVNIQMAPPSLNVTKDGDSYSLRWETMKMRYEHIDHTFEIQYRKDTATWKDSKTETLQNAHSMALPALEPSTRYWARVRVRTSRTGYNGIWSEWSEARSWDTESVLPMWVLALIVIFLTIAVLLALRFCGIYGYRLRRKWEEKIPNPSKSHLFQNGSAELWPPGSMSAFTSGSPPHQGPWGSRFPELEGVFPVGFGDSEVSPLTIEDPKHVCDPPSGPDTTPAASDLPTEQPPSPQPGPPAASHTPEKQASSFDFNGPYLGPPHSRSLPDILGQPEPPQEGGSQKSPPPGSLEYLCLPAGGQVQLVPLAQAMGPGQAVEVERRPSQGAAGSPSLESGGGPAPPALGPRVGGQDQKDSPVAIPMSSGDTEDPGVASGYVSSADLVFTPNSGASSVSLVPSLGLPSDQTPSLCPGLASGPPGAPGPVKSGFEGYVELPPIEGRSPRSPRNNPVPPEAKSPVLNPGERPADVSPTSPQPEGLLVLQQVGDYCFLPGLGPGPLSLRSKPSSPGPGPEIKNLDQAFQVKKPPGQAVPQVPVIQLFKALKQQDYLSLPPWEVNKPGEVC

SEQ ID NO: 908 - protein, 915 aa, Homo sapiens
VLVPACPELTREMVLAQGLLSMALLALCWERSLAGAEETIPLQTLRCYNDYTSHITCRWADTQDAQRLVNVTLIRRVNEDLLEPVSCDLSDDMPWSACPHPRCVPRRCVIPCQSFVVTDVDYFSFQPDRPLGTRLTVTLTQHVQPPEPRDLQISTDQDHFLLTWSVALGSPQSHWLSPGDLEFEVVYKRLQDSWEDAAILLSNTSQATLGPEHLMPSSTYVARVRTRLAPGSRLSGRPSKWSPEVCWDSQPGDEAQPQNLECFFDGAAVLSCSWEVRKEVASSVSFGLFYKPSPDAGSAVLLREEECSPVLREGLGSLHTRHHCQIPVPDPATHGQYIVSVQPRRAEKHIKSSVNIQMAPPSLNVTKDGDSYSLRWETMKMRYEHIDHTFEIQYRKDTATWKDSKTETLQNAHSMALPALEPSTRYWARVRVRTSRTGYNGIWSEWSEARSWDTESVLPMWVLALIVIFLTIAVLLALRFCGIYGYRLRRKWEEKIPNPSKSHLFQNGSAELWPPGSMSAFTSGSPPHQGPWGSRFPELEGVFPVGFGDSEVSPLTIEDPKHVCDPPSGPDTTPAASDLPTEQPPSPQPGPPAASHTPEKQASSFDFNGPYLGPPHSRSLPDILGQPEPPQEGGSQKSPPPGSLEYLCLPAGGQVQLVPLAQAMGPGQAVEVERRPSQGAAGSPSLESGGGPAPPALGPRVGGQDQKDSPVAIPMSSGDTEDPGVASGYVSSADLVFTPNSGASSVSLVPSLGLPSDQTPSLCPGLASGPPGAPGPVKSGFEGYVELPPIEGRSPRSPRNNPVPPEAKSPVLNPGERPADVSPTSPQPEGLLVLQQVGDYCFLPGLGPGPLSLRSKPSSPGPGPEIKNLDQAFQVKKPPGQAVPQVPVIQLFKALKQQDYLSLPPWEVNKPGEVC

SEQ ID NO: 909 - protein, 901 aa, Homo sapiens
VLVPACPELTREMVLAQGLLSMALLALCWERSLAGAEETIPLQTLRCYNDYTSHITCRWADTQDAQRLVNVTLIRRVNEDLLEPVSCDLSDDMPWSACPHPRCVPRRCVIPCQSFVVTDVDYFSFQPDRPLGTRLTVTLTQHVQPPEPRDLQISTDQDHFLLTWSVALGSPQSHWLSPGDLEFEVVYKRLQDSWEDAAILLSNTSQATLGPEHLMPSSTYVARVRTRLAPGSRLSGRPSKWSPEVCWDSQPGDEAQPQNLECFFDGAAVLSCSWEVRKEVASSVSFGLFYKPSPDAGEEECSPVLREGLGSLHTRHHCQIPVPDPATHGQYIVSVQPRRAEKHIKSSVNIQMAPPSLNVTKDGDSYSLRWETMKMRYEHIDHTFEIQYRKDTATWKDSKTETLQNAHSMALPALEPSTRYWARVRVRTSRTGYNGIWSEWSEARSWDTESVLPMWVLALIVIFLTIAVLLALRFCGIYGYRLRRKWEEKIPNPSKSHLFQNGSAELWPPGSMSAFTSGSPPHQGPWGSRFPELEGVFPVGFGDSEVSPLTIEDPKHVCDPPSGPDTTPAASDLPTEQPPSPQPGPPAASHTPEKQASSFDFNGPYLGPPHSRSLPDILGQPEPPQEGGSQKSPPPGSLEYLCLPAGGQVQLVPLAQAMGPGQAVEVERRPSQGAAGSPSLESGGGPAPPALGPRVGGQDQKDSPVAIPMSSGDTEDPGVASGYVSSADLVFTPNSGASSVSLVPSLGLPSDQTPSLCPGLASGPPGAPGPVKSGFEGYVELPPIEGRSPRSPRNNPVPPEAKSPVLNPGERPADVSPTSPQPEGLLVLQQVGDYCFLPGLGPGPLSLRSKPSSPGPGPEIKNLDQAFQVKKPPGQAVPQVPVIQLFKALVVSVMSVGPPVP

SEQ ID NO: 910 - protein, 332 aa, Homo sapiens
VEGAGSSGSEWPRRWAVPESPPFGPLQARSPSVAAMASPQLCRALVSAQWVAEALRAPRAGQPLQLLDASWYLPKLGRDARREFEERHIPGAAFFDIDQCSDRTSPYDHMLPGAEHFAEYAGRLGVGAATHVVIYDASDQGLYSAPRVWWMFRAFGHHAVSLLDGGLRHWLRQNLPLSSGKSQPAPAEFRAQLDPAFIKTYEDIKENLESRRFQVVDSRATGRFRGTEPEPRDGIEPGHIPGTVNIPFTDFLSQEGLEKSPEEIRHLFQEKKVDLSKPLVATCGSGVTACHVALGAYLCGKPDVPIYDGSWVEWYMRARPEDVISEGRGKTH

SEQ ID NO: 911 - protein, 16 aa, Homo sapiens
LRLLIGASFLGSTLWM

SEQ ID NO: 912 - protein, 11 aa, Homo sapiens
LASFLGSTLWM

SEQ ID NO: 913 - protein, 43 aa, Homo sapiens
LVRLPGNILLDSIMACGLVASNLNLKPGECLRVRGEVAPDAKR

SEQ ID NO: 914 - protein, 34 aa, Homo sapiens
LDSIMACGLVASNLNLKPGECLRVRGEVAPDAKS

SEQ ID NO: 915 - protein, 42 aa, Homo sapiens
LDSIMACGLVASNLNLKPGECLRVRGEVAPDAKSEFFQQASC

SEQ ID NO: 916 - protein, 150 aa, Homo sapiens
LLWEAGLGALLGPGCPSSSGARRLPVPQRGQEWMSLFRLRPASTPPQLDETLSERLWGLTEMFPERVRSAAGATFDLSLFVAQKMYRFSRAALWIGTTSFMILVLPVVFETEKLQMEQQQQLQQRQILLGPNTGLSGGMPGALPSLPGKI

SEQ ID NO: 917 - protein, 257 aa, Homo sapiens
LSHEDTLALLEGLVSRREAALKEDFRRETAARIQEELSALRAEHQQDSEDLFKKIVRASQESEARIQQLKSEWQRYWAPPAGLGLLLPSPTHSPGRTGEQSRRAESSDHLAKQMHDPGVLPGELCEGAEAAGGPAGRPAAGAGGSGTEAELGGGRSGPAAPADPGRAGRRGISVPGLDQSVPCPRWRGPRGAPSERGDASSAARAGEQDPHPCGRDAGQVGQGSRGLPEPDAAERRCDWSDRGAGAPHREAGPAALQ

SEQ ID NO: 918 - protein, 127 aa, Homo sapiens
LALGLQSHRKFSAPRHGSLGFLPRKRSSRHRGKVKSFPKDDPSKPVHLTAFLGYKAGMTHIVREVDRPGSKVNKKEVVEAVTIVETPPMVVVGIVGYVETPRGLRTFKTVFAEHISDECKRRFYKNW

SEQ ID NO: 919 - protein, 416 aa, Homo sapiens
VGGASGRGGSSLFCLAAAAPFCAVTPSQRLGLEPGRSPPSFAHHLPTMDPRKVNELRAFVKMCKQDPSVLHTEEMRFLREWVESMGGKVPPATQKAKSEENTKEEKPDSKKVEEDLKADEPSSEESDLEIDKEGVIEPDTDAPQEMGDENAEITEEMMDQANDKKVAAIEALNDGELQKAIDLFTDAIKLNPRLAILYAKRASVFVKLQKPNAAIRDCDRAIEINPDSAQPYKWRGKAHRLLGHWEEAAHDLALACKLDYDEDASAMLKEVQPRAQKIAEHRRKYERKREEREIKERIERVKKAREEHERAQREEEARRQSGAQYGSFPGGFPGGMPGNFPGGMPGMGGGMPGMAGMPGLNEILSDPEVLAAMQDPEVMVAFQDVAQNPANMSKYQSNPKVMNLISKLSAKFGGQA

SEQ ID NO: 920 - protein, 35 aa, Homo sapiens
MSGWESYYKTEGDEEAEEEQEENLEASVYPKCVHQ

SEQ ID NO: 921 - protein, 506 aa, Homo sapiens
LGWDPEQAGEGSALSRPGAMAALMTPGTGAPPAPGDFSGEGSQGLPDPSPEPKQLPELIRMKRDGGRLSEADIRGFVAAVVNGSAQGAQIGAMLMAIRLRGMDLEETSVLTQALAQSGQQLEWPEAWRQQLVDKHSTGGVGDKVSLVLAPALAACGCKVPMISGRGLGHTGGTLDKLESIPGFNVIQSPEQMQVLLDQAGCCIVGQSEQLVPADGILYAARDVTATVDSLPLITASILSKKLVEGLSALVVDVKFGGAAVFPNQEQARELAKTLVGVGASLGLRVAAALTAMDKPLGRCVGHALEVEEALLCMDGAGPPDLRDLVTTLGGALLWLSGHAGTQAQGAARVAAALDDGSALGRFERMLAAQGVDPGLARALCSGSPAERRQLLPRAREQEELLAPADAPLPAGTVELVRALPLALVLHELGAGRSRAGEPLRLGVGAELLVDVGQRLRRGTPWLRVHRDGPALSGPQSRALQEALVLSDRAPFAAPSPFAELVLPPQQ

SEQ ID NO: 922 - protein, 501 aa, Homo sapiens
LGWDPEQAGEGSALSRPGAMAALMTPGTGAPPAPGDFSGEGSQGLPDPSPEPKQLPELIRMKRDGGRLSEADIRGFVAAVVNGSAQGAQIGAMLMAIRLRGMDLEETSVLTQALAQSGQQLEWPEAWRQQLVDKHSTGGVGDKVSLVLAPALAACGCKVPMISGRGLGHTGGTLDKLESIPGFNVIQSPEQMQVLLDQAGCCIVGQSEQLVPADGILYAARDVTATVDSLPLITASILSKKLVEGLSALVVDVKFGGAAVFPNQEQARELAKTLVGVGASLGLRVAAALTAMDKPLGRCVGHALEVEEALLCMDGAGPPDLRDLVTTLGGALLWLSGHAGTQAQGAARVAAALDDGSALGRFERMLAAQGVDPGLARALCSGSPAERRQLLPRAREQEELLAPADGTVELVRALPLALVLHELGAGRSRAGEPLRLGVGAELLVDVGQRLRRGTPWLRVHRDGPALSGPQSRALQEALVLSDRAPFAAPSPFAELVLPPQQ

SEQ ID NO: 923 - protein, 505 aa, Homo sapiens
LGWDPEQAGEGSALSRHPRRPGAMAALMTPGTGAPPAPGDFSGEGSQGLPDPSPEPKQLPELIRMKRDGGRLSEADIRGFVAAVVNGSAQGAQIGAMLMAIRLRGMDLEETSVLTQALAQSGQQLEWPEAWRQQLVDKHSTGGVGDKVSLVLAPALAACGCKVPMISGRGLGHTGGTLDKLESIPGFNVIQSPEQMQVLLDQAGCCIVGQSEQLVPADGILYAARDVTATVDSLPLITASILSKKLVEGLSALVVDVKFGGAAVFPNQEQARELAKTLVGVGASLGLRVAAALTAMDKPLGRCVGHALEVEEALLCMDGAGPPDLRDLVTTLGGALLWLSGHAGTQAQGAARVAAALDDGSALGRFERMLAAQGVDPGLARALCSGSPAERRQLLPRAREQEELLAPADGTVELVRALPLALVLHELGAGRSRAGEPLRLGVGAELLVDVGQRLRRGTPWLRVHRDGPALSGPQSRALQEALVLSDRAPFAAPSPFAELVLPPQQ

SEQ ID NO: 924 - protein, 366 aa, Homo sapiens
LGWDPEQAGEGSALSRPGAMAALMTPGTGAPPAPGDFSGEGSQGLPDPSPEPKQLPELIRMKRDGGRLSEADIRGFVAAVVNGSAQGAQIGAMLMAIRLRGMDLEETSVLTQALAQSGQQLEWPEAWRQQLVDKHSTGGVGDKVSLVLAPALAACGCKVPMISGRGLGHTGGTLDKLESIPGFNVIQSPEQMQVLLDQAGCCIVGQSEQLVPADGILYAARDVTATVDSLPLITGWRGSQPRASGRGSADRHGQAPGSLRGPRPGGGGGAALHGRRRPARLKGPGHHARGRPALAQRTRGDSGPGRCPGGRGAGRRLGPWPLRADAGGAGRGSRSGPSPVLGKSRRTPAAAASRPGAGGAAGARRW

SEQ ID NO: 925 - protein, 266 aa, Homo sapiens
MGARRAHRSVRGEGWAFLTPTGRSARETLGPWGCDGAPLPAPAPGCPTAVGCHPHAYPHIPGAMLMAIRLRGMDLEETSVLTQALAQSGQQLEWPEAWRQQLVDKHSTGGVGDKVSLVLAPALAACGCKVRNHLLSRREPIPHMQQPVHPQAAPNLKPGPKPPRPYQGFSPPCSPAQFSPPRSPAQRLGPLWLQTRPLGAGKRSTDGIQTPFPLGPQTAPPREELRTFLPLPQALFPQGQVPTSSPTDTSQPRKLPFHSLTSWAPL

SEQ ID NO: 926 - protein, 727 aa, Homo sapiens
VSGVELAQQASMARMSFVIAACQLVLGLLMTSLTESSIQNSECPQLCVCEIRPWFTPQSTYREATTVDCNDLRLTRIPSNLSSDTQVLLLQSNNIAKTVDELQQLFNLTELDFSQNNFTNIKEVGLANLTQLTTLHLEENQITEMTDYCLQDLSNLQELYINHNQISTISAHAFAGLKNLLRLHLNSNKLKVIDSRWFDSTPNLEILMIGENPVIGILDMNFKPLANLRSLVLAGMYLTDIPGNALVGLDSLESLSFYDNKLVKVPQLALQKVPNLKFLDLNKNPIHKIQEGDFKNMLRLKELGINNMGELVSVDRYALDNLPELTKLEATNNPKLSYIHRLAFRSVPALESLMLNNNALNAIYQKTVESLPNLREISIHSNPLRCDCVIHWINSNKTNIRFMEPLSMFCAMPPEYKGHQVKEVLIQDSSEQCLPMISHDSFPNRLNVDIGTTVFLDCRAMAEPEPEIYWVTPIGNKITVETLSDKYKLSSEGTLEISNIQIEDSGRYTCVAQNVQGADTRVATIKVNGTLLDGTQVLKIYVKQTESHSILVSWKVNSNVMTSNLKWSSATMKIDNPHITYTARVPVDVHEYNLTHLQPSTDYEVCLTVSNIHQQTQKSCVNVTTKNAAFAVDISDQETSTALAAVMGSMFAVISLASIAVYFAKRFKRKNYHHSLKKYMQKTSSIPLNELYPPLINLWEGDSEKDKDGSADTKPTQVDTSRSYYMW

SEQ ID NO: 927 - protein, 379 aa, Homo sapiens
LAVVGGQWAMLGAVEGPRWKQAEDIRDIYDFRDVLGTGAFSEVILAEDKRTQKLVAIKCIAKEALEGKEGSMENEIAVLHKIKHPNIVALDDIYESGGHLYLIMQLVSGGELFDRIVEKGFYTERDASRLIFQVLDAVKYLHDLGIVHRDLKPENLLYYSLDEDSKIMISDFGLSKMEDPGSVLSTACGTPGYVAPEVLAQKPYSKAVDCWSIGVIAYILLCGYPPFYDENDAKLFEQILKAEYEFDSPYWDDISDSAKDFIRHLMEKDPEKRFTCEQALQHPWIAGDTALDKNIHQSVSEQIKKNFAKSKWKQAFNATAVVRHMRKLQLGTSQEGQGQTASHGELLTPVAGGPAAGCCCRDCCVEPGTELSPTLPHQL

SEQ ID NO: 928 - protein, 48 aa, Homo sapiens
LAVVGGQWAMLGAVEGPRWKQAEDIRDIYDFRDVLGTLSPGGGKDDRH

SEQ ID NO: 929 - protein, 20 aa, Homo sapiens
MFPLFCGVTFGLSSLLSVDP

SEQ ID NO: 930 - protein, 108 aa, Homo sapiens
MSGALDVLQMKEEDVLKFLAAGTHLGGTNLDFQMEQYIYKRKSDGIYIINLKRTWEKLLLAARAIVAIENPADVSVISSRNTGQVCGTVVSFYIIEIKLTDIVRHRKT

SEQ ID NO: 931 - protein, 46 aa, Homo sapiens
LPCEMIPCSKRTFHLFNHSNFHSHLHDYRKHGVCRLVTHKKIAVRW

SEQ ID NO: 932 - protein, 48 aa, Homo sapiens
LSSSDPPTSDSQVAGTTGVLMTSLVDHVRDLFCLRGTGKGWTAPLSLY

SEQ ID NO: 933 - protein, 43 aa, Homo sapiens
LIGFLTSLKFLSGVLMTSLVDHVRDLFCLRGTGKGWTAPLSLY

SEQ ID NO: 934 - protein, 244 aa, Homo sapiens
MAGFKRGYDGKIAGLYDLDKTLGRGHFAVVKLARHVFTGEKVAVKVIDKTKLDTLATGHLFQEVRCMKLVQHPNIVRLYEVIDTQTKLYLILELGDGGDMFDYIMKHEEGLNEDLAKKYFAQIVHAISYCHKLHVVHRDLKPENVVFFEKQGLVKLTDFGFSNKFQPGKKLTTSCGSLAYSAPEILLGDEYDAPAVDIWSLGVILFMLVCGQPPFQEANDSETLTMIMDCKYTVPSHVSKECKE

SEQ ID NO: 935 - protein, 127 aa, Homo sapiens
LGVILFMLVCGQPPFQEANDSETLTMIMDCKYTVPSHVSKECKDLITRMLQRDPKRRASLEEIENHPWLQGVDPSPATKYNIPLVSYKNLSEEEHNSIIQRMVLGDIADRDAIVEYVNARQYRGPQV

SEQ ID NO: 936 - protein, 365 aa, Homo sapiens
MAPKLITVLCLGFCLNQKICPHAGAQDKFSLSAWPSPVVPLGGRVTLSCHSHLRFVIWTIFQTTGTRSHELHTGLSNNITISPVTPEHAGTYRCVGIYKHASKWSAESNSLKIIVTGLFTKPSISAHPSSLVHAGARVSLRCHSELAFDEFILYKEGHIQHSQQLDQGMEAGIHYVEAVFSMGPVTPAHAGAYRCCGCFSHSRYEWSAPSDPLDIVITGKYKKPSLSTQVDPMMRLGEKLTLFCSSEISFDQYHLFRHGVAHGQWLSGGQRHREAFQANFSVGRATPVPGGTYRCYGSFNDSPYKPPVTRCNFTPQETLRVLLCHSQNPPLNLTPPWQTQSPRKANGRMKRSLQQKRHRRSYMPS

SEQ ID NO: 937 - protein, 356 aa, Homo sapiens [sequence omitted]

SEQ ID NO: 938 - protein, 104 aa, Homo sapiens
LALGASTVMMGSLLAATTEAPGEYFFSDGIRLKKYRGMGSLDAMDKHLSSQNRYFSEADKIKVAQGVSGAVQDKGSIHKFVPYLIAGIQHSCQDIGAKSLTQVR

SEQ ID NO: 939 - protein, 608 aa, Homo sapiens
MGPKKSWRSHFFPLPEVWLLLLLSQALSPSHGPQTQAGVGLVWSVPLPSALRSQSCLGAPLRDASELTTVHLFPTRGWGARRALWVHSSASASSAASRRRLRAQASGISSFSLVDGGAPREDGGARGVWLPSSGQVSAQRTGRRLVGLEPTPTGSLTPRPPRPVPGMPRARKGNTLRKGGQRRGGGARSSAQADSGSSDDEAASEARSTASECPSLLSTTAEDSLGGDVVDEQGQQEDLEEKLKEYVDCLTDKSAKTRQGALESLRLALASRLLPDFLLERRLTLADALEKCLKKGKGEEQALAAAVLGLLCVQLGPGPKGEELFHSLQPLLVSVLSDSTASPAARLHCASALGLGCYVAAADIQDLVSCLACLESVFSRFYGLGGSSTSPVVPASLHGLLSAALQAWALLLTICPSTQISHILDRQLPRLPQLLSSESVNLRIAAGETIALLFELARDLEEEFVYEDMEALCSVLRTLATDSNKYRAKADRRRQRSTFRAVLHSVEGGECEEEIVRFGFEVLYMDSWARHRIYAAFKEVLGSGMHHHLQNNELLRDIFGLGPVLLLDATALKACKVPRFEKHLYNAAAFKARTKARSRVRDKRADIL

SEQ ID NO: 940 - protein, 90 aa, Homo sapiens
LAAAVLGLLCVQLGPGPKGEELFHSLQPLLVSVLSDSTASPAARLHVSVPVPHETLPAPYPSAEWWVPPIFSLLYSEGSELQGWEPRFTR

SEQ ID NO: 941 - protein, 304 aa, Homo sapiens
MWGCQAPLSRLPASGETPMSQSWLVSPLATRPSFTARCSHSTRHTGWRWCCFMERPLTLTRGSSWAHCSYCHRGATGPWPLTFQLTTRSAMTSKGPEEEHPSVTLFRQYLRIRTVQPKPDYGAAVAFFEETARQLGLGCQKVEVAPGYVVTVLTWPGTNPTLSSILLNSHTDVVPVFKEHWSHDPFEAFKDSEGYIYARGAQDMKCVSIQYLEAVRRLKVEGHRFPRTIHMTFVPDEEVGGHQGMELFVQRPEFHALRAGFALDEGEQVGKPMSSQAGSRRLLVGTELLHPLNPLSLLRHSQSH

SEQ ID NO: 942 - protein, 245 aa, Homo sapiens
MWGCQAPLSRLPASGETPMSQSWLVSPLATRPSFTARCSHSTRHTGWRWCCFMERPLTLTRGSSWAHCSYCHRGATGPWPLTFQVAPGYVVTVLTWPGTNPTLSSILLNSHTDVVPVFKEHWSHDPFEAFKDSEGYIYARGAQDMKCVSIQYLEAVRRLKVEGHRFPRTIHMTFVPDEEVGGHQGMELFVQRPEFHALRAGFALDEGEQVGKPMSSQAGSRRLLVGTELLHPLNPLSLLRHSQSH

SEQ ID NO: 943 - protein, 238 aa, Homo sapiens
MTSKGPEEEHPSVTLFRQYLRIRTVQPKPDYGAAVAFFEETARQLGLGCQKVEVAPGYVVTVLTWPGTNPTLSSILLNSHTDVVPVFKEHWSHDPFEAFKDSEGYIYARGAQDMKCVSIQYLEAVRRLKVEGHRFPRTIHMTFVPGIANPTDAFTVFYSERSPWSPQAEDTAFPLHLPRGAGYQHWEARPCLTLHGGHSSREAAQGCKLHPGIPGEGMAEVRQPGRQWGGSGRRYHRG

SEQ ID NO: 944 - protein, 169 aa, Homo sapiens
LSSPSLTMVAPGYVVTVLTWPGTNPTLSSILLNSHTDVVPVFKEHWSHDPFEAFKDSEGYIYARGAQDMKCVSIQYLEAVRRLKVEGHRFPRTIHMTFVPDEEVGGHQGMELFVQRPEFHALRAGFALDEGEQVGKPMSSQAGSRRLLVGTELLHPLNPLSLLRHSQSH

SEQ ID NO: 945 - protein, 440 aa, Homo sapiens
LAALSVGCLGLGNWARRPWRRPPVIQLCFQSSGKKLRRFSFNCGGRGVPTRPALLLVAVGGAETERAATATAAAFGAASPAMAAPCAEDPSLERHFKGHRDAVTCVDFSINTKQLASGSMDSCLMVWHMKPQSRAYRFTGHKDAVTCVNFSPSGHLLASGSRDKTVRIWVPNVKGESTVFRAHTATVRSVHFCSDGQSFVTASDDKTVKVWATHRQKFLFSLSQHINWVRCAKFSPDGRLIVSASDDKTVKLWDKSSRECVHSYCEHGGFVTYVDFHPSGTCIAAAGMDNTVKVWDVRTHRLLQHYQLHSAAVNGLSFHPSGNYLITASSDSTLKILDLMEGRLLYTLHGHQGPATTVAFSRTGEYFASGGSDEQVMVWKSNFDIVDHGEVTKVPRPPATLASSMGNLTVSILEQRLTLTEDKLKQCLENQQLIMQRATP

SEQ ID NO: 946 - protein, 398 aa, Homo sapiens
LEQPPGPLGASVLPIPLSSRVGSAGVEDKESWHGKPLPKNMAEQIIQEIYSQIQSKKKILATPPQEDAPSVDIANIRMPSLPSYKVGDKIATRKAYGQALAKLGHASDRIIALDGDTKNSTFSEIFKKEHPDRFIECYIAEQNMVSIAVGCATRNRTVPFCSTFAAFFTRAFDQIRMAAISESNINLCGSHCGVSIGEDGPSQMALEDLAMFRSVPTSTVFYPSDGVATEKAVELAANTKGICFIRTSRPENAIIYNNNEDFQVGQAKVVLKSKDDQVTVIGAGVTLHEALAAAELLKKEKINIRVLDPFTIKPLDRKLILDSARATKGRILTVEDHYYEGGIGEAVSSAVVGEPGITVTHLAVNRVPRSGKPAELLKMFGIDRDAIAQAVRGLITKA

SEQ ID NO: 947 - protein, 465 aa, Homo sapiens
LAPWARASGPLVGWPTPANTSTRPDINRLGQSDPAPLQHQMDIYQKRCEAFGWHAIIVDGHSVEELCKAFGQAKHQPTAIIAKTFKGRGITGVEDKESWHGKPLPKNMAEQIIQEIYSQIQSKKKILATPPQEDAPSVDIANIRMPSLPSYKVGDKIATRKAYGQALAKLGHASDRIIALDGDTKNSTFSEIFKKEHPDRFIECYIAEQNMVSIAVGCATRNRTVPFCSTFAAFFTRAFDQIRMAAISESNINLCGSHCGVSIGEDGPSQMALEDLAMFRSVPTSTVFYPSDGVATEKAVELAANTKGICFIRTSRPENAIIYNNNEDFQVGQAKVVLKSKDDQVTVIGAGVTLHEALAAAELLKKEKINIRVLDPFTIKPLDRKLILDSARATKGRILTVEDHYYEGGIGEAVSSAVVGEPGITVTHLAVNRVPRSGKPAELLKMFGIDRDAIAQAVRGLITKA

SEQ ID NO: 948 - protein, 405 aa, Homo sapiens
LEQPPGPLGASVLPIPLSSRVGSAGVEDKESWHGKPLPKNMAEQIIQEIYSQIQSKKKILATPPQEDAPSVDIANIRMPSLPSYKVGDKIATRKAYGQALAKLGHASDRIIALDGDTKNSTFSEIFKKEHPDRFIECYIAEQNMVSIAVGCATRNRTVPFCSTFAAFFTRAFDQIRMAAISESNINLCGSHCGVSIGEDGPSQMALEDLAMFRSVPTSTVFYPSDGVATEKAVELAANTKGICFIRTSRPENAIIYNNNEDFQVGQAKVVLKSKDDQVTVIGAGVTLHEALAAAELLKKGEEKGPPKSSTERPLHARSWGSFFRSFCSFLKSSQLERKHFISLNNDSNYSHPLSTCSVWHVAKSWGCSAHSPYPMTLKSRPPQHGGQISGLEPASWAGITQPGTS

SEQ ID NO: 949 - protein, 143 aa, Homo sapiens
VSIAVGCATRNRTVPFCSTFAAFFTRAFDQIRMAAISESNINLCGSHCGVSIGEDGPSQMALEDLAMFRSVPTSTVFYPSDGVATEKAVELAANTKVGCMAVLSPAGSHHFPRETEEEARAGHLLPQGVFPDLAPGVRVACGS

SEQ ID NO: 950 - protein, 155 aa, Homo sapiens
LTSSFMPFSLGVWLVVGCRNLVTLLPLECKCHLFCISMRGCSFTQNAGSLDGWGGGSQLGPGERDWPDSLSVHSYRVYCLLGDGELSEGSVWEAMAFASIYKLDNLVAILDINRLGQSDPAPLQHQMDIYQKRCEAFGYVRGCGLSVVTARESGL

SEQ ID NO: 951 - protein, 145 aa, Homo sapiens
MESYHKPDQQKLQALKDTANRLRISSIQATTAAGSGHPTSCCSAAEIMAVLFFHTMRYKSQDPRNPHNDRFVLSKGHAAPILYAVWAEAGFLAEAELLNLRKISSDLWDGLHRQILRQGQLPSLLLAGRPWPSPASISWTTLWPF

SEQ ID NO: 952 - protein, 288 aa, Homo sapiens
MSLVLLSLAALCRSAVPREPTVQCGSETGPSPEWMLQHDLIPGDLRDLRVEPVTTSVATGDYSILMNVSWVLRADASIRLLKATKICVTGKSNFQSYSCVRCNYTEAFQTQTRPSGGKWTFSYIGFPVELNTVYFIGAHNIPNANMNEDGPSMSVNFTSPGCLDHIMKYKKKCVKAGSLWDPNITACKKNEETVEVNFTTTPLGNRYMALIQHSTIIGFSQVFEPHQKKQTRASVVIPVTGDSEGATVQVKFSELLWGGKGHRRLFHHSLLLRMSSLLSNALLPADTS

SEQ ID NO: 953 - protein, 154 aa, Homo sapiens
LLPVGPLGRSMRWCLLLIWAQGLRQAPLASGMMTGTIETTGNISAEKGGSIILQCHLSSTTAQVTQVNWEQQDQLLAICNADLGWHISPSFKDRVAPGPGLGLTLQSLTVNDTGEYFCIYHTYPDGTYTGRIFLEVLESSGIPAGASWWINLSL

SEQ ID NO: 954 - protein, 746 aa, Homo sapiens
VTPLILKLLKKPKTAENQKASEENEITQPGGSSAKPGLPCLNFEAVLSPDPALIHSTHSLTNSHAHTGSSDCDISCKGMTERIHSINLHNFSNSVLETLNEQRNRGHFCDVTVRIHGSMLRAHRCVLAAGSPFFQDKLLLGYSDIEIPSVVSVQSVQKLIDFMYSGVLRVSQSEALQILTAASILQIKTVIDECTRIVSQNVGDVFPGIQDSGQDTPRGTPESGTSGQSSDTESGYLQSHPQHSVDRIYSALYACSMQNGSGERSFYSGAVVSHHETALGLPRDHHMEDPSWITRIHERSQQMERYLSTTPETTHCRKQPRPVRIQTLVGNIHIKQEMEDDYDYYGQQRVQILERNESEECTEDTDQAEGTESEPKGESFDSGVSSSIGTEPDSVEQQFGPGAARDSQAEPTQPEQAAEAPAEGGPQTNQLETGASSPERSNEVEMDSTVITVSNSSDKSVLQQPSVNTSIGQPLPSTQLYLRQTETLTSNLRMPLTLTSNTQVIGTAGNTYLPALFTTQPAGSGPKPFLFSLPQPLAGQQTQFVTVSQPGLSTFTAQLPAPQPLASSAGHSTASGQGEKKPYECTLCNKTFTAKQNYVKHMFVHTGEKPHQCSICWRSFSLKDYLIKHMVTHTGVRAYQCSICNKRFTQKSSLNVHMRLHRGEKSYECYICKKKFSHKTLLERHVALHSASNGTPPAGTPPGARAGPPGVVACTEGTTYVCSVCPAKFDQIEQFNDHMRMHVSDG

SEQ ID NO: 955 - protein, 24 aa, Homo sapiens
LPYSRHTLSSLGLLWPLTSLSSAF

SEQ ID NO: 956 - protein, 148 aa, Homo sapiens [sequence omitted]

SEQ ID NO: 957 - protein, 551 aa, Homo sapiens
VTGRLAGAWAACAVGSCMVSLASPDSDEEDEERPARKRRQVERATEDGEEDEEMIESIENLEDLKGHSVREWVSMAGPRLEIHHRFKNFLRTHVDSHGHNVFKERISDMCKENRESLVVNYEDLAAREHVLAYFLPEAPAELLQIFDEAALEVVLAMYPKYDRITNHIHVRISHLPLVEELRSLRQLHLNQLIRTSGVVTSCTGVLPQLSMVKYNCNKCNFVLGPFCQSQNQEVKPGSCPECQSAGPFEVNMEETIYQNYQRIRIQESPGKVAAGRLPRSKDAILLADLVDSCKPGDEIELTGIYHNNYDGSLNTANGFPVFATVILANHVAKKDNKVAVGELTDEDVKMITSLSKDQQIGEKIFASIAPSIYGHEDIKRGLALALFGGEPKNPGGKHKVRGDINVLLCGDPGTAKSQFLKYIEKVSSRAIFTTGQGASAVGLTAYVQRHPVSREWTLEAGALVLADRGVCLIDEFDKMNDQDRTSIHEAMEQQSISISKAGIVTSLQARCTVIAAANPIGRDAGPLRGGQPRQTPPQQQGGGGAGQWQRC

SEQ ID NO: 958 - protein, 791 aa, Homo sapiens
VTGRLAGAWAACAVGSCMVSLASPDSDEEDEERPARKRRQVERATEDGEEDEEMIESIENLEDLKGHSVREWVSMAGPRLEIHHRFKNFLRTHVDSHGHNVFKERISDMCKENRESLVVNYEDLAAREHVLAYFLPEAPAELLQIFDEAALEVVLAMYPKYDRITNHIHVRISHLPLVEELRSLRQLHLNQLIRTSGVVTSCTGVLPQLSMVKYNCNKCNFVLGPFCQSQNQEVKPGSCPECQSAGPFEVNMEETIYQNYQRIRIQESPGKVAAGRLPRSKDAILLADLVDSCKPGDEIELTGIYHNNYDGSLNTANGFPVFATVILANHVAKKDNKVAVGELTDEDVKMITSLSKDQQIGEKIFASIAPSIYGHEDIKRGLALALFGGEPKNPGGKHKVRGDINVLLCGDPGTAKSQFLKYIEKVSSRAIFTTGQGASAVGLTAYVQRHPVSREWTLEAGALVLADRGVCLIDEFDKMNDQDRTSIHEAMEQQSISISKAGIVTSLQARCTVIAAANPIGGRYDPSLTFSENVDLTEPIISRFDILCVVRDTVDPVQDEMLARFVVGSHVRHHPSNKEEEGLANGSAAEPAMPNTYGVEPLPQEVLKKYIIYAKERVHPKLNQMDQDKVAKMYSDLRKESMATGSIPITVRHIESMIRMAEAHARIHLRDYVIEDDVNMAIRVMLESFIDTQKFSVMRSMRKTFARYLSFRRDNNELLLFILKQLVAEQVTYQRNRFGAQQDTIEVPEKDLVDKARQINIHNLSAFYDSELFRMNKFSHDLKRKMILQQF

SEQ ID NO: 959 - protein, 264 aa, Homo sapiens
LPPGPRPGRGRSRLEPPRAPSPPAPPRPLAFLFPARPPGFRAPPATNPLATMSVELEEALPVTTAEGMAKKVTKAGGSAALSPSKKRKNSKKKNQPGKYSQLVVETIRRLGERNGSSLAKIYTEAKKVPWFDQQNGRTYLKYSIKALVQNDTLLQVKGTGANGSFKLNRKKLEGGGERRGAPAAATAPAPTAHKAKKAAPGAAGSRRADKKPARGQKPEQRSHKKGAGAKKDKGGKAKKTAAAGGKKVKKAAKPSVPKVPKGRK

SEQ ID NO: 960 - protein, 1983 aa, Homo sapiens
LRGEADPGPGAGVGGGWRGQEAHRGPGPPPASRRLRAPGSRPRLAPCTRRAAQPAHARMAPRAAGGAPLSARAAAASPPPFQTPPRCPVPLLLLLLLGAARAGALEIQRRFPSPTPTNNFALDGAAGTVYLAAVNRLYQLSGANLSLEAEAAVGPVPDSPLCHAPQLPQASCEHPRRLTDNYNKILQLDPGQGLVVVCGSIYQGFCQLRRRGNISAVAVRFPPAAPPAEPVTVFPSMLNVAANHPNASTVGLVLPPAAGAGGSRLLVGATYTGYGSSFFPRNRSLEDHRFENTPEIAIRSLDTRGDLAKLFTFDLNPSDDNILKIKQGAKEQHKLGFVSAFLHPSDPPPGAQSYAYLALNSEARAGDKESQARSLLARICLPHGAGGDAKKLTESYIQLGLQCAGGAGRGDLYSRLVSVFPARERLFAVFERPQGSPAARAAPAALCAFRFADVRAAIRAARTACFVEPAPDVVAVLDSVVQGTGPACERKLNIQLQPEQLDCGAAHLQHPLSILQPLKATPVFRAPGLTSVAVASVNNYTAVFLGTVNGRLLKINLNESMQVVSRRVVTVAYGEPVHHVMQFDPADSGYLYLMTSHQMARVKVAACNVHSTCGDCVGAADAYCGWCALETRCTLQQDCTNSSQQHFWTSASEGPSRCPAMTVLPSEIDVRQEYPGMILQISGSLPSLSGMEMACDYGNNIRTVARVPGPAFGHQIAYCNLLPRDQFPPFPPNQDHVTVEMSVRVNGRNIVKANFTIYDCSRTAQVYPHTACTSCLSAQWPCFWCSQQHSCVSNQSRCEASPNPTSPQDCPRTLLSPLAPVPTGGSQNILVPLANTAFFQGAALECSFGLEEIFEAVWVNESVVRCDQVVLHTTRKSQVFPLSLQLKGRPARFLDSPEPMTVMVYNCAMGSPDCSQCLGREDLGHLCMWSDGCRLRGPLQPMAGTCPAPEIHAIEPLSGPLDGGTLLTIRGRNLGRRLSDVAHGVWIGGVACEPLPDRYTVSEEIVCVTGPAPGPLSGVVTVNASKEGKSRDRFSYVLPLVHSLEPTMGPKAGGTRITIHGNDLHVGSELQVLVNDTDPCTELMRTDTSIACTMPEGALPAPVPVCVRFERRGCVHGNLTFWYMQNPVITAISPRRSPVSGGRTITVAGERFHMVQNVSMAVHHIGREPTLCKVLNSTLITCPSPGALSNASAPVDFFINGRAYADEVAVAEELLDPEEAQRGSRFRLDYLPNPQFSTAKREKWIKHHPGEPLTLVIHKEQDSLGLQSHEYRVKIGQVSCDIQIVSDRIIHCSVNESLGAAVGQLPITIQVGNFNQTIATLQLGGSETAIIVSIVICSVLLLLSVVALFVFCTKSRRAERYWQKTLLQMEEMESQIREEIRKGFAELQTDMTDLTKELNRSQGIPFLEYKHFVTRTFFPKCSSLYEERYVLPSQTLNSQGSSQAQETHPLLGEWKIPESCRPNMEEGISLFSSLLNNKHFLIVFVHALEQQKDFAVRDRCSLASLLTIALHGKLEYYTSIMKELLVDLIDASAAKNPKLMLRRTESVVEKMLTNWMSICMYSCLRETVGEPFFLLLCAIKQQINKGSIDAITGKARYTLSEEWLLRENIEAKPRNLNVSFQGCGMDSLSVRAMDTDTLTQVKEKILEAFCKNVPYSQWPRAEDVDLEWFASSTQSYILRDLDDTSVVEDGRKKLNTLAHYKIPEGASLAMSLIDKKDNTLGRVKDLDTEKYFHLVLPTDELAEPKKSHRQSHRKKVLPEIYLTRLLSTKGTLQKFLDDLFKAILSIREDKPPLAVKYFFDFLEEQAEKRGISDPDTLHIWKTNSLPLRFWVNILKNPQFVFDIDKTDHIDACLSVIAQAFIDACSISDLQLGKDSPTNKLLYAKEIPEYRKIVQRYYKQIQDMTPLSEQEMNAHLAEESRKYQNEFNTNVAMAEIYKYAKRYRPQIMAALEANPTARRTQLQHKFEQVVALMEDNIYECYSEA

SEQ ID NO: 961 - protein, 68 aa, Homo sapiens [sequence omitted]

SEQ ID NO: 962 - protein, 15 aa, Homo sapiens
MGLLLLRLTKQLMLL

SEQ ID NO: 963 - protein, 406 aa, Homo sapiens
LTCWLFPLAALSRGALRLLTPSVKSCCSVAQAGVQWQDLSSLQSPSLRFKQFSCLSLPSRWDYRTFGSRASELLWMASALWTVLPSRMSLRSLKWSLLLLSLLSFFVMWYLSLPHYNVIERVNWMYFYEYEPIYRQDFHFTLREHSNCSHQNPFLVILVTSHPSDVKARQAIRVTWGEKKSWWGYEVLTFFLLGQEAEKEDKMLALSLEDEHLLYGDIIRQDFLDTYNNLTLKTIMAFRWVTEFCPNAKYVMKTDTDVFINTGNLVKYLLNLNHSEKFFTGYPLIDNYSYRGFYQKTHISYQEYPFKVFPPYCSGLGYIMSRDLVPRIYEMMGHVKPIKFEDVYVGICLNLLKVNIHIPEDTNLFFLYRIHLDVCQLRRVIAAHGFSSKEIITFWQVMLRNTTCHY

SEQ ID NO: 964 - protein, 165 aa, Homo sapiens
MLLTVCLTFFLYSGYSQEVVCYTLGNIPQMPSAPRLVRAGITWVTLQWSKPEGCSPEEVITYTLEIQEDENDNLFHPKYTGEDLTCTVKNLKRSTQYKFRLTASNTEGKSCPSEVLVCTTSPDRPGPPTRPLVKGPVTSHGFSVKWGMFCCCCYCFFFFFLLIDF

SEQ ID NO: 965 - protein, 70 aa, Homo sapiens
LLAASSVRREVPGVTAPGPAERRGTGSPGECDRLKSSLLVWWDDRRFCPGGMTGSSHIKKIPNSHFSTII

SEQ ID NO: 966 - protein, 36 aa, Homo sapiens
LLAASSVRREVPGVTAPGPAESHIKKIPNSHFSTII

SEQ ID NO: 967 - protein, 38 aa, Homo sapiens
MVRSRLTATSASRVQVILLSPGFNHIKKIPNSHFSTII

SEQ ID NO: 968 - protein, 81 aa, Homo sapiens
VVFRIMSGGSADYNREHGGPEGMDPDGVIESNWNEIVDNFDDMNLKESLLRGIYAYGFEKPSAIQQRAIIPCIKGKRNWHF

SEQ ID NO: 969 - protein, 125 aa, Homo sapiens
VVFRIMSGGSADYNREHGGPEGMDPDGVIESNWNEIVDNFDDMNLKESLLRGIYAYGFEKPSAIQQRAIIPCIKGYDVIAQAQSGTGKTATFAISILQQLEIEFKETQALVLAPTRELAQQVLIV

SEQ ID NO: 970 - protein, 101 aa, Homo sapiens
VVFRIMSGGSADYNREHGGPEGMDPDGVIESNWNEIVDNFDDMNLKESLLRGIYAYGFEKPSAIQQRAIIPCIKDPKGNSGTWRLYGSHLSCLHWWNKCSK

SEQ ID NO: 971 - protein, 86 aa, Homo sapiens
LRGWERTKSSVKIQTKCWWCFHTCGIWGGGGDNIAHTQPTHSGVGGGWFLRRVGLQRSELEKDLRLVYVHLFLARQRLTVKSPRPS

SEQ ID NO: 972 - protein, 837 aa, Homo sapiens
VRASRTTPTLVSSLHPAGLAGAAAPVLSSSHREPHGERESGRGPRRGGRDGAGPRACGEGAVAAPRAAAGSSVWQFRMMDQARSAFSNLFGGEPLSYTRFSLARQVDGDNSHVEMKLAVDEEENADNNTKANVTKPKRCSGSICYGTIAVIVFFLIGFMIGYLGYCKGVEPKTECERLAGTESPVREEPGEDFPAARRLYWDDLKRKLSEKLDSTDFTGTIKLLNENSYVPREAGSQKDENLALYVENQFREFKLSKVWRDQHFVKIQVKDSAQNSVIIVDKNGRLVYLVENPGGYVAYSKAATVTGKLVHANFGTKKDFEDLYTPVNGSIVIVRAGKITFAEKVANAESLNAIGVLIYMDQTKFPIVNAELSFFGHAHLGTGDPYTPGFPSFNHTQFPPSRSSGLPNIPVQTISRAAAEKLFGNMEGDCPSDWKTDSTCRMVTSESKNVKLTVSNVLKEIKILNIFGVIKGFVEPDHYVVVGAQRDAWGPGAAKSGVGTALLLKLAQMFSDMVLKDGFQPSRSIIFASWSAGDFGSVGATEWLEGYLSSLHLKAFTYINLDKAVLGTSNFKVSASPLLYTLIEKTMQNVKHPVTGQFLYQDSNWASKVEKLTLDNAAFPFLAYSGIPAVSFCFCEDTDYPYLGTTMDTYKELIERIPELNKVARAAAEVAGQFVIKLTHDVELNLDYERYNSQLLSFVRDLNQYRADIKEMGLSLQWLYSARGDFFRATSRLTTDFGNAEKTDRFVMKKLNDRVMRVEYHFLSPYVSPKESPFRHVFWGSGSHTLPALLENLKLRKQNNGAFNETLFRNQLALATWTIQGAANALSGDVWDIDNEF

SEQ ID NO: 973 - protein, 702 aa, Homo sapiens
LRLREPAALEMELLPLWLCLGFHFLTVGWRNRSGTATAASQGVCKLVGGAADCRGQSLASVPSSLPPHARMLTLDANPLKTLWNHSLQPYPLLESLSLHSCHLERISRGAFQEQGHLRSLVLGDNCLSENYEETAAALHALPGLRRLDLSGNALTEDMAALMLQNLSSLRSVSLAGNTIMRLDDSVFEGLERLRELDLQRNYIFEIEGGAFDGLAELRHLNLAFNNLPCIVDFGLTRLRVLNVSYNVLEWFLATGGEAAFELETLDLSHNQLLFFPLLPQYSKLRTLLLRDNNMGFYRDLYNTSSPREMVAQFLLVDGNVTNITTVSLWEEFSSSDLADLRFLDMSQNQFQYLPDGFLRKMPSLSHLNLHQNCLMTLHIREHEPPGALTELDLSHNQLSELHLAPGLASCLGSLRLFNLSSNQLLGVPPGLFANARNITTLDMSHNQISLCPLPAASDRVGPPSCVDFRNMASLRSLSLEGCGLGALPDCPFQGTSLTYLDLSSNWGVLNGSLAPLQDVAPMLQVLSLRNMGLHSSFMALDFSGFGNLRDLDLSGNCLTTFPRFGGSLALETLDLRRNSLTALPQKAVSEQLSRGLRTIYLSQNPYDCCGVDGWGALQHGQTVADWAMVTCNLSSKIIRVTELPGGVPRDCKWERLDLGLLYLVLILPSCLTLLVACTVIVLTFKKPLLQVIKSRCHWSSVY

SEQ ID NO: 974 - protein, 138 aa, Homo sapiens
LGANNRSRFVPVPWRVAGLLGTGLLKGTMSGRLWSKAIFAGYKRGLRNQREHTALLKIEGVYARDETEFYLGKRCAYVYKAKNNTVTPGGKPNKTRVIWGKVTRAHGNSGMVRAKFRSNLPAKAIGHRIRVMLYPSRI

SEQ ID NO: 975 - protein, 65 aa, Homo sapiens
LLGTGLLKGTMSGRLWSKAIFAGYKRGLRNQREHTALLKIEGVYARDETEFYLGKRCAYVYKAKK

SEQ ID NO: 976 - protein, 92 aa, Homo sapiens
LLGTGLLKGTMSGRLWSKAIFAGYKRGLRNQREHTALLKIEGVYARDETEFYLGKRCAYVYKAKKLKCNGTISAHCNLCFPGSSDYPASASE

SEQ ID NO: 977 - protein, 123 aa, Homo sapiens
LLGTGLLKGTMSGRLWSKAIFAGYKRGLRNQREHTALLKIEGVYARDETEFYLGKRCAYVYKAKNNTVTPGGKPNKTRVIWGKVTRAHGNSGMVRAKFRSNLPAKAIGHRIRVVSMVFSKMDV

SEQ ID NO: 978 - protein, 234 aa, Homo sapiens
LRGQLQGHTPVGCLLVPPRSTASSLMPPAPWQSGARGAGGLGLDRVPRVPLEAPHGTVPLGHCSRDLGCGLAPSCGEVLGGSVWPACLLTWVWPEQVKATQEENRELRSRCEELHGKNLELGKIMDRFEEVVYQAMEEVQKQKELSKAEIQKVLKEKDQLTTDLNSMEKSFSDLFKRFEKQKEVIEGYRKVCLRHPGVLTSEADGLMVQASGATSCCLCTLVLGQASPCHGGMG

SEQ ID NO: 979 - protein, 1020 aa, Homo sapiens
VGLAPSRPAAGMGQLCWLPLLAPLLLLRPPGVQSAGPIRAFVVPHSHMDVGWVYTVQESMRAYAANVYTSVVEELARGQQRRFIAVEQEFFRLWWDGVASDQQKYQVRQLLEEGRLEFVIGGQVMHDEAVTHLDDQILQLTEGHGFLYETFGIRPQFSWHVDPFGASATTPTLFALAGFNAHLGSRIDYDLKAAMQEARGLQFVWRGSPSLSERQEIFTHIMDQYSYCTPSHIPFSNRSGFYWNGVAVFPKPPQDGVYPNMSEPVTPANINLYAEALVANVKQRAAWFRTPHVLWPWGCDKQFFNASVQFANMDPLLDHINSHAAELGVSVQYATLGDYFRALHALNVTWRVRDHHDFLPYSTEPFQAWTGFYTSRSSLKGLARRASALLYAGESMFTRYLWPAPRGHLDPTWALQQLQQLRWAVSEVQHHDAITGTESPKVRDMYATHLASGMLGMRKLMASIVLDELQPQAPMAASSDAGPAGHFASVYNPLAWTVTTIVTLTVGFPGVRVTDEAGHPVPSQIQNSTETPSAYDLLILTTIPGLSYRHYNIRPTAGAQEGTQEPAATVASTLQFGRRLRRRTSHAGRYLVPVANDCYIVLLDQDTNLMHSIWERQSNRTVRVTQEFLEYHVNGDVKQGPISDNYLFTPGKAAVPAWEAVEMEIVAGQLVTEIRQYFYRNMTAQNYTYAIRSRLTHVPQGHDGELLCHRIEQEYQAGPLELNREAVLRTSTNLNSQQVIYSDNNGYQMQRRPYVSYVNNSIARNYYPMVQSAFMEDGKSRLVLLSERAHGISSQGNGQVEVMLHRRLWNNFDWDLGYNLTLNDTSVVHPVLWLLLGSWSLTTALRQRSALALQHRPVVLFGDLAGTAPKLPGPQQQEAVTLPPNLHLQILSIPGWRYSSNHTEHSQNLRKGHRGEAQADLRRVLLRLYHLYEVGEDPVLSQPVTVNLEAVLQALGSVVAVEERSLTGTWDLSMLHRWSWRTGPGRHRGDTTSPSRPPGGPIITVHPKEIRTFFIHFQQQ

SEQ ID NO: 980 - protein, 951 aa, Homo sapiens
LCWLPLLAPLLLLRPPGVQSAGPIRAFVVPHSHMDVGWVYTVQESMRAYAANVYTSVVEELARGQQRRFIAVEQEFFRLWWDGVASDQQKYQVRQLLEEGRLEFVIGGQVMHDEAVTHLDDQILQLTEGHGFLYETFGIRPQFSWHVDPFGASATTPTLFALAGFNAHLGSRIDYDLKAAMQEARGLQFVWRGSPSLSERQEIFTHIMDQYSYCTPSHIPFSNRSGFYWNGVAVFPKPPQDGVYPNMSEPVTPANINLYAEALVANVKQRAAWFRTPHVLWPWGCDKQFFNASVQFANMDPLLDHINSHAAELGVSVQYATLGDYFRALHALNVTWRVRDHHDFLPYSTEPFQAWTGFYTSRSSLKGLARRASALLYAGESMFTRYLWPAPRGHLDPTWALQQLQQLRWAVSEVQHHDAITGTESPKVRDMYATHLASGMLGMRKLMASIVLDELQPQAPMAASSDAGPAGHFASVYNPLAWTVTTIVTLTVGFPGVRVTDEAGHPVPSQIQNSTETPSAYDLLILTTIPGLSYRHYNIRPTAGAQEGTQEPAATVASTLQFGRRLRRRTSHAGRYLVPVANDCYIVLLDQDTNLMHSIWERQSNRTVRVTQEFLEYHVNGDVKQGPISDNYLFTPGKAAVPAWEAVEMEIVAGQLVTEIRQYFYRNMTAQNYTYAIRSRLTHVPQGHDGELLCHRIEQEYQAGPLELNREAVLRTSTNLNSQQVIYSDNNGYQMQRRPYVSYVNNSIARNYYPMVQSAFMEDGKSRLVLLSERAHGISSQGNGQVEVMLHRRLWNNFDWDLGYNLTLNDTSVVHPVLWLLLGSWSLTTALRQRSALALQHRPVVLFGDLAGTAPKLPGPQQQEAVTLPPNLHLQILSIPGWRYSSNHTEHSQNLRKGHRGEAQADLRRVLLRLYHLYEVGEDPVLSQPVTVNLEVNFPTPIQTISQGSKP

SEQ ID NO: 981 - protein, 117 aa, Homo sapiens
LRRAVAVMAAQCVRLARRSLPALALSLRPSPRLLCTATKQKNSGQNLEEDMGQSEQKADPPATEKTLLEEKVKLEEQLKETVEKYKRALADTENLRQRSQKLVEEAKLYGTFNITWC

SEQ ID NO: 982 - protein, 88 aa, Homo sapiens
LFYLHLKKLLVLPTSKSSQMITFTFANGGVATMRTSGTEPKIKYYAELCAPPGNSDPEQLKKELNELVSAIEEHFFQPQKYNLQPKAD

SEQ ID NO: 983 - protein, 61 aa, Homo sapiens
MKPPPSQAKAFKYGLRPGTQSVTRGSLREGRAPRGSSDRAGRGWRSCGGAARRKVLSERSG

SEQ ID NO: 984 - protein, 405 aa, Homo sapiens
LGGSASCFSSSLGYFCRALREDAAQADGDQPRDAEQSEWRLAPSLAPSPASAEAGAPTGSGCWQGPSRPLRAPETAGLGRGLGAFPGPLHLAGDSTKPVTGRRRGLRPVASERQAELPRAWRGQHRLGCTGFAGATCGPRFVLCHCAGPGGGGRAGLGLLPGSGAGAEGARLLAPPPGRCPRPACPRAPGRLVSSPQVLSRLGVAGQWRFVDVLGLEEESLGSVPAPACALLLLFPLTAQHENFRKKQIEELKGQEVSPKVYFMKQTIGNSCGTIGLIHAVANNQDKLGFEDGSVLKQFLSETEKMSPEDRAKCFEKNEAIQAAHDAVAQEGQCRVDDKVNFHFILFNNVDGHLYELDGRMPFPVNHGASSEDTLLKDAAKVCREFTEREQGEVRFSAVALCKAA

SEQ ID NO: 985 - protein, 170 aa, Homo sapiens
LLQFFRRSEVKMKNHLLFWGVLAVFIKAVHVKAQEDERIVLVDNKCKCARITSRIIRSSEDPNEDIVERNIRIIVPLNNRENISDPTSPLRTRFVYHLSDLCKKCDPTEVELDNQIVTATQSNICDEDSATETCYTYDRNKCYTAVVPLVYGGETKMVETALTPDACYPD

SEQ ID NO: 986 - protein, 71 aa, Homo sapiens
LCVNMTSKLAVALLAAFLISAALCEGAVLPRSAKELRCQCIKTYSKPFHPKFIKELRVIESGPHCANTEIM

SEQ ID NO: 987 - protein, 99 aa, Homo sapiens
LCVNMTSKLAVALLAAFLISAALCEGAVLPRSAKELRCQCIKTYSKPFHPKFIKELRVIESGPHCANTEIIVKLSDGRELCLDPKENWVQRVVEKFLKR

SEQ ID NO: 988 - protein, 316 aa, Homo sapiens
VPAPQRSRDSPRRRARRPELPKPSRAAHTPGLHSLFQHPLVLAAARVPETELPQRPRRRRCEGPMRAPLLPPAPVVLSLLILGSGHYAAGLDLNDTYSGKREPFSGDHSADGFEVTSRSEMSSGSEISPVSEMPSSSEPSSGADYDYSEEYDNEPQIPGYIVDDSVRVEQVVKPPQNKTESENTSDKPKRKKKGGKNGKNRRNRKKKNPCNAEFQNFCIHGECKYIEHLEAVTCKCQQEYFGERCGEKSMKTHSMIDSSLSKIALAAIAAFMSAVILTAVAVITVQLRRQYVRKYEGEAEERKKLRQENGNVHAIA

SEQ ID NO: 989 - protein, 228 aa, Homo sapiens
VGGGVLSAASGAASDLAAGGDGWVARAAPLGAGGRRRAAVASARRGANGRGRPCGAPRAGDPGRVRGRARGGTRRGGGWARRLGNSIFSVPPPLAGVCAPQAGGKAGKDSGKAKTKAVSRSQRAGLQFPVGRIHRHLKSRTTSHGRVGATAAVYSAAILEYLTAEVLELAGNASKDLKVKRITPRHLQLAIRGDEELDSLIKATIAGGGVIPHIHKSLIGKKGQQKTV

SEQ ID NO: 990 - protein, 231 aa, Homo sapiens
VARDLKMRLHLLLLLALCGAGTTAAELSYSLRGNWSICNGNGSLELPGAVPGCVHSALFQQGLIQDSYYRFNDLNYRWVSLDNWTYSKEFKIPFEISKWQKVNLILEGVDTVSKILFNEVTIGETDNMFNRYSFDITNVVRDVNSIELRFQSAVLYAAQQSKAHTRYQVPPDCPPLVQKGECHVNFVRKEQCSFSWDWGPSFPTQGIWKDVRIEAYNICHLNYFTFSPIYE

SEQ ID NO: 991 - protein, 121 aa, Homo sapiens
LAPRSGAGGGAAEEGPRAGPGPGACGFRKRRARCLAARLAAMSSASGLRRGHPAGGEENMTETDAFYKREMFDPAEKYKMDHRRRGIALIFNHERFFWHLTLPERRGTCADRDNLTRSVNC

SEQ ID NO: 992 - protein, 170 aa, Homo sapiens
LSAAGAADPRAAFGRRRCLVRRGVVLRRLSGAVGVGCGMCSAGELLRGGDGGERDEDGDALAEREAAGTGWDPGASPRRRGQRPKESEQDVEDSQNHTGEPVGDDYKKMGTLFGELNKNLINMGFTRMYFGERIVEPVIVIFFWVMLWFLGLQALGLVAVLCLVIIYVQQ

SEQ ID NO: 993 - protein, 484 aa, Homo sapiens
LLPGISPEPAPREKEPGSIRPHCPDSRLDSVPSAPAGLRSSGARGAVVAAAPGMFHSPRRLCSALLQRDAPGLRRLPAPGLRRPLSPPAAVPRPASPRLLAAASAASGAARSCSRTVCSMGTGTSRLYSALAKTLNSSAASQHPEYLVSPDPEHLEPIDPKELLEECRAVLHTRPPRFQRDFVDLRTDCPSTHPPIRVMQWNILAQALGEGKDNFVQCPVEALKWEERKCLILEEILAYQPDILCLQEVDHYFDTFQPLLSRLGYQGTFFPKPWSPCLDVEHNNGPDGCALFFLQNRFKLVNSANIRLTAMTLKTNQVAIAQTLECKESGRQFCIAVTHLKARTGWERFRSAQGCDLLQNLQNITQGAKIPLIVCGDFNAEPTEEVYKHFASSSLNLNSAYKLLSADGQSEPPYTTWKIRTSGECRHTLDYIWYSKHALNVRSALDLLTEEQIGPNRLPSFNYPSDHLSLVCDFSFTEESDGLS

SEQ ID NO: 994 - protein, 56 aa, Homo sapiens
VRKMAGNSILLAAVSILSACQQSYFALQVGKARLKYKVTPPAVTGSPEFERVFRAQ

SEQ ID NO: 995 - protein, 789 aa, Homo sapiens
LKHWTMPHTLWMVWVLGVIISLSKEESSNQASLSCDRNGICKGSSGSLNSIPSGLTEAVKSLDLSNNRITYISNSDLQRCVNLQALVLTSNGINTIEEDSFSSLGSLEHLDLSYNYLSNLSSSWFKPLSSLTFLNLLGNPYKTLGETSLFSHLTKLQILRVGNMDTFTKIQRKDFAGLTFLEELEIDASDLQSYEPKSLKSIQNVSHLILHMKQHILLLEIFVDVTSSVECLELRDTDLDTFHFSELSTGETNSLIKKFTFRNVKITDESLFQVMKLLNQISGLLELEFDDCTLNGVGNFRASDNDRVIDPGKVETLTIRRLHIPRFYLFYDLSTLYSLTERVKRITVENSKVFLVPCLLSQHLKSLEYLDLSENLMVEEYLKNSACEDAWPSLQTLILRQNHLASLEKTGETLLTLKNLTNIDISKNSFHSMPETCQWPEKMKYLNLSSTRIHSVTGCIPKTLEILDVSNNNLNLFSLNLPQLKELYISRNKLMTLPDASLLPMLLVLKISRNAITTFSKEQLDSFHTLKTLEAGGNNFICSCEFLSFTQEQQALAKVLIDWPANYLCDSPSHVRGQQVQDVRLSVSECHRTALVSGMCCALFLLILLTGVLCHRFHGLWYMKMMWAWLQAKRKPRKAPSRNICYDAFVSYSERDAYWVENLMVQELENFNPPFKLCLHKRDFIPGKWIIDNIIDSIEKSHKTVFVLSENFVKSEWCKYELDFSHFRLFDENNDAAILILLEPIEKKAIPQRFCKLRKIMNTKTYLEWPMDEAQREGFWVNLRAAIKS

SEQ ID NO: 996 - protein, 29 aa, Homo sapiens
LLTLGALVFGGCALHLPLPPFSMRSPSSE

SEQ ID NO: 997 - protein, 95 aa, Homo sapiens
LRETSPRFRAPPTEPRARGLTRGPTQGPPERQDSGPDLQRLQAQRPQAAWAERRFQALARSLNCRKIFQHCFYKSLFRPNQRGDRGELKTPFFHV

SEQ ID NO: 998 - protein, 95 aa, Homo sapiens
MAGRSRPFPPLPGNRGSPQTDLRETSPRFRAPPTEPRARGLTRGPTQGPPERQDSGPDLQRLQAQRPQAAWAERRFQALARSLNCREASATQKPA

SEQ ID NO: 999 - protein, 104 aa, Homo sapiens
MAGRSRPFPPLPGNRGSPQTDLRETSPRFRAPPTEPRARGLTRGPTQGPPERQDSGPDLQRLQAQRPQAAWAERRFQALARSLNCRSSVDSHQSGGVLKEFYVD

SEQ ID NO: 1000 - protein, 532 aa, Homo sapiens
LAPGRTLAATAPWPWLAARARCAEVAELAGPRRKRGEAGPRQEVALPGPSASGSGGGAPRAADSKLGRGPRAEAAAVAATLGVRWRRPRPGWVPTALGGAMDEAVGDLKQALPCVAESPTVHVEVHQRGSSTAKKEDINLSVRKLLNRHNIVFGDYTWTEFDEPFLTRNVQSVSIIDTELKVKDSQPIDLSACTVALHIFQLNEDGPSSENLEEETENIIAANHWVLPAAEFHGLWDSLVYDVEVKSHLLDYVMTTLLFSDKNVNSNLITWNRVVLLHGPPGTGKTSLCKALAQKLTIRLSSRYRYGQLIEINSHSLFSKWFSESGKLVTKMFQKIQDLIDDKDALVFVLIDEVESLTAARNACRAGTEPSDAIRVVNAVLTQIDQIKRHSNVVILTTSNITEKIDVAFVDRADIKQYIGPPSAAAIFKIYLSCLEELMKCQIIYPRQQLLTLRELEMIGFIENNVSKLSLLLNDISRKSEGLSGRVLRKLPFLAHALYVQAPTVTIEGFLQALSLAVDKQFEERKKLAAYI

SEQ ID NO: 1001 - protein, 309 aa, Homo sapiens
LGVRWRRPRPGWVPTALGGAMDEAVGDLKQALPCVAESPTVHVEVHQRGSSTAKKEDINLSVRKLLNRHNIVFGDYTWTEFDEPFLTRNVQSVSIIDTELKVKDSQPIDLSACTVALHIFQLNEDGPSSENLEEETENIIAANHWVLPAAEFHGLWDSLVYDVEVKSHLLDYVMTTLLFSDKNVNSNLITWNRVVLLHGPPGTGKTSLCKALAQKLTIRLSSRYRYGQLIEINSHSLFSKWFSESGKLVTKMFQKIQDLIDDKDALVFVLIDEVESLTAARNACRAGTEPSDAIRVVNAVLTQIDQIKR

SEQ ID NO: 1002 - protein, 38 aa, Homo sapiens
LFLDPYKILCNRHIHVTFSCAQKGYHHPTTHIREHPGF

SEQ ID NO: 1003 - protein, 574 aa, Homo sapiens
LWEPPSRLPATLGGAGVGWVGGYKAGGEGEAPRTVLSWLTPFPLLPLGHACSFTMPGSLPLNAEACWPKDVGIVALEIYFPSQYVDQAELEKYDGVDAGKYTIGLGQAKMGFCTDREDINSLCMTVVQNLMERNNLSYDCIGRLEVGTETIIDKSKSVKTNLMQLFEESGNTDIEGIDTTNACYGGTAAVFNAVNWIESSSWDGRYALVVAGDIAVYATGNARPTGGVGAVALLIGPNAPLIFERGLRGTHMQHAYDFYKPDMLSEYPIVDGKLSIQCYLSALDRCYSVYCKKIHAQWQKEGNDKDFTLNDFGFMIFHSPYCKLVQKSLARMLLNDFLNDQNRDKNSIYSGLEAFGDVKLEDTYFDRDVEKAFMKASSELFSQKTKASLLVSNQNGNMYTSSVYGSLASVLAQYSPQQLAGKRIGVFSYGSGLAATLYSLKVTQDATPGSALDKITASLCDLKSRLDSRTGVAPDVFAENMKLREDTHHLVNYIPQGSIDSLFEGTWYLVRVDEKHRRTYARRPTPNDDTLDEGVGLVHSNIATEHIPSPAKKVPRLPATAAEPEAAVISNGEH

SEQ ID NO: 1004 - protein, 175 aa, Homo sapiens
LLPLGHACSFTMPGSLPLNAEACWPKDVGIVALEIYFPSQYVDQAELEKYDGVDAGKYTIGLGQAKMGFCTDREDINSLCMTVVQNLMERNNLSYDCIGRLEVGTETIIDKSKSVKTNLMQLFEESGNTDIEGIDTTNACYGGTAAVFNAVNWIESSSWDGMLHAYSPPSPKIFF

SEQ ID NO: 1005 - protein, 201 aa, Homo sapiens
VAHSLSSAAARSRLCPKEETVTDLETAVLYPSHSSFTMPGSLPLNAEACWPKDVGIVALEIYFPSQYVDQAELEKYDGVDAGKYTIGLGQAKMGFCTDREDINSLCMTVVQNLMERNNLSYDCIGRLEVGTETIIDKSKSVKTNLMQLFEESGNTDIEGIDTTNACYGGTAAVFNAVNWIESSSWDGMLHAYSPPSPKIFF

SEQ ID NO: 1006 - protein, 119 aa, Homo sapiens
VLLSHLGTTRNNFEGKKVISLEYEAYLPMAENEVRKICSDIRQKWPVKHIAVFHRLGLVPVSEASIIIAVSSAHRAASLEAVSYAIDTLKAKVPIWKKEIYEESSTWKGNKECFWASNS

SEQ ID NO: 1007 - protein, 630 aa, Homo sapiens
LPPASPPHAEGPRARRRQPLSAPMIARCLLAVRSLRRVGGSRILLRMTLGREVMSPLQAMSSYTVAGRNVLRWDLSPEQIKTRTEELIVQTKQVYDAVGMLGIEEVTYENCLQALADVEVKYIVERTMLDFPQHVSSDKEVRAASTEADKRLSRFDIEMSMRGDIFERIVHLQETCDLGKIKPEARRYLEKSIKMGKRNGLHLPEQVQNEIKSMKKRMSELCIDFNKNLNEDDTFLVFSKAELGALPDDFIDSLEKTDDDKYKITLKYPHYFPVMKKCCIPETRRRMEMAFNTRCKEENTIILQQLLPLRTKVAKLLGYSTHADFVLEMNTAKSTSRVTAFLDDLSQKLKPLGEAEREFILNLKKKECKDRGFEYDGKINAWDLYYYMTQTEELKYSIDQEFLKEYFPIEVVTEGLLNTYQELLGLSFEQMTDAHVWNKSVTLYTVKDKATGEVLGQFYLDLYPREGKYNHAACFGLQPGCLLPDGSRMMAVAALVVNFSQPVAGRPSLLRHDEVRTYFHEFGHVMHQICAQVSFFFPPVNLPISFFRKLLDCCQVSAPNRFFQKLNVFKNFIGLLQNQNFPYPVLFHNIFLLGGSSTSERCLLNNSLWKKNKTICKERLQILCFFLLIL

SEQ ID NO: 1008 - protein, 162 aa, Homo sapiens
LWLLPAVLLSFAQARGADRMGKCRGLRTARKLRSHRRDQKWHDKQYKKAHLGTALKANPFGGASHAKGIVLEKVGVEAKQPNSAIRKCVRVQLIKNGKKITAFVPNDGCLNFIEENDEVLVAGFGRKGHAVGDIPGVRFKVVKVANVSLLALYKGKKERPRS

SEQ ID NO: 1009 - protein, 104 aa, Homo sapiens
LWLLPAVLLSFAQARGADRMGKCRGLRTARKLRSHRRDQKWHDKQYKKAHLGTALKANPFGGASHAKGIVLEKVGVEAKQPNSAIRKCVRVQLIKNGKKERPRS

SEQ ID NO: 1010 - protein, 509 aa, Homo sapiens
VAAAARVARRVNMAALTTVVVAAAATAVAGAVAGAGAATGTGVGATPAPQQSDGCFSTSGGIRPFHLQNWKQKVNQTKKAEFVRTAEKFKNQVINMEKDKHSHFYNQKSDFRIEHSMLEELENKLIHSRKTERAKIQQQLAKIHNNVKKLQHQLKDVKPTPDFVEKLREMMEEIENAINTFKEEQRLIYEELIKEEKTTNNELSAISRKIDTWALGNSETEKAFRAISSKVPVDKVTPSTLPEEVLDFEKFLQQTGGRQGAWDDYDHQNFVKVRNKHKGKPTFMEEVLEHLPGKTQDEVQQHEKWYQKFLALEERKKESIQIWKTKKQQKREEIFKLKEKADNTPVLFHNKQEDNQKQKEEQRKKQKLAVEAWKKQKSIEMSMKCASQLKEEEEKEKKHQKERQRQFKLKLLLESYTQQKKEQEEFLRLEKEIREKAEKAEKRKNAADEISRFQERVENNVSRDPSRLYKPTKGWEERTKKIGPTGSGPLLHIPHRAIPTWRQGIQRRV

SEQ ID NO: 1011 - protein, 509 aa, Homo sapiens
LRTGFSAFLHCPGLNTAPDTHYCSKQCFIEYNGKVITTYCPANNEPIARVRQASVADYEETVKKAREAWKIWADIPAPKRGEIVRQIGDALREKIQVLGSLVSLEMGKILVEGVGEVQEYVDICDYAVGLSRMIGGPILPSERSGHALIEQWNPVGLVGIITAFNFPVAVYGWNNAIAMICGNVCLWKGAPTTSLISVAVTKIIAKVLEDNKLPGAICSLTCGGADIGTAMAKDERVNLLSFTGSTQVGKQVGLMVQERFGRSLLELGGNNAIIAFEDADLSLVVPSALFAAVGTAGQRCTTARRLFIHESIHDEVVNRLKKAYAQIRVGNPWDPNVLYGPLHTKQAVSMFLGAVEEAKKEGGTVVYGGKVMDRPGNYVEPTIVTGLGHDASIAHTETFAPILYVFKFKNEEEVFAWNNEVKQGLSSSIFTKDLGRIFRWLGPKGSDCGIVNVNIPTSGAEIGGAFGGEKHTGGGRESGSDAWKQYMRRSTCTINYSKDLPLAQGIKFQ

SEQ ID NO: 1012 - protein, 599 aa, Homo sapiens
LFQAGFSRRLLRKTRGRRGGGGVVPSGRGRVCPMGSPGRGAGLYFSSSQGLGLIPSPGLSMWRLPRALCVHAAKTSKLSGPWSRPAAFMSTLLINQPQYAWLKELGLREENEGVYNGSWGGRGEVITTYCPANNEPIARVRQASVADYEETVKKAREAWKIWADIPAPKRGEIVRQIGDALREKIQVLGSLVSLEMGKILVEGVGEVQEYVDICDYAVGLSRMIGGPILPSERSGHALIEQWNPVGLVGIITAFNFPVAVYGWNNAIAMICGNVCLWKGAPTTSLISVAVTKIIAKVLEDNKLPGAICSLTCGGADIGTAMAKDERVNLLSFTGSTQVGKQVGLMVQERFGRSLLELGGNNAIIAFEDADLSLVVPSALFAAVGTAGQRCTTARRLFIHESIHDEVVNRLKKAYAQIRVGNPWDPNVLYGPLHTKQAVSMFLGAVEEAKKEGGTVVYGGKVMDRPGNYVEPTIVTGLGHDASIAHTETFAPILYVFKFKNEEEVFAWNNEVKQGLSSSIFTKDLGRIFRWLGPKGSDCGIVNVNIPTSGAEIGGAFGGEKHTGGGRESGSDAWKQYMRRSTCTINYSKDLPLAQGIKFQ

SEQ ID NO: 1013 - protein, 469 aa, Homo sapiens
VRVYAKKESDLNGAQIKLREYEAALNSKDAALATALGDKKSLEGDLEDLKDQIAQLEASLAAAKKQLADETLLKVDLENRCQSLTEDLEFRKSMYEEEINETRRKHETRLVEVDSGRQIEYEYKLAQALHEMREQHDAQVRLYKEELEQTYHAKLENARLSSEMNTSTVNSAREELMESRMRIESLSSQLSNLQKESRACLERIQELEDLLAKEKDNSRRMLTDKEREMAEIRDQMQQQLNDYEQLLDVKLALDMEISAYRKLLEGEEERLKLSPSPSSRVTVSRASSSRSVRTTRGKRKRVDVEESEASSSVSISHSASATGNVCIEEIDVDGKFIRLKNTSEQDQPMGGWEMIRKIGDTSVSYKYTSRYVLKAGQTVTIWAANAGVTASPPTDLIWKNQNSWGTGEDVKVILKNSQGEEVAQRSTVFKTTIPEEEEEEEEAAGVVVEEELFHQQGTPRASNRSCAIM

SEQ ID NO: 1014 - protein, 148 aa, Homo sapiens
LPHIVTANRHLLMGLTSQLLPPLFFLLACAGNFVHGHKCDITLQEIIKTLNSLTEQKTLCTELTVTDIFAASKQHACLPTSRHTGTICRPPSARVPSTSTRLQSPERTQLRRKPSAGLRLCSGSSTATMRRTLAAWVRLHSSSTGTSS

SEQ ID NO: 1015 - protein, 165 aa, Homo sapiens
LPHIVTANRHLLMGLTSQLLPPLFFLLACAGNFVHGHKCDITLQEIIKTLNSLTEQKTLCTELTVTDIFAASKNTTEKETFCRAATVLRQFYSHHEKDTRCLGATAQQFHRHKQLIRFLKRLDRNLWGLAGLNSCPVKEANQSTLENFLERLKTIMREKYSKCSS

SEQ ID NO: 1016 - protein, 343 aa, Homo sapiens
LPLGPRFPARTRVSLRTHTRCTRQSGASPCPDSRRSSRAPATRPQAPVSAAGAAGPGRQKMAVPPTYADLGKSARDVFTKGYGFGLIKLDLKTKSENGLEFTSSGSANTETTKVTGSLETKYRWTEYGLTFTEKWNTDNTLGTEITVEDQLARGLKLTFDSSFSPNTGKKNAKIKTGYKREHINLGCDMDFDIAGPSIRGALVLGYEGWLAGYQMNFETAKSRVTQSNFAVGYKTDEFQLHTNVNDGTEFGGSIYQKVNKKLETAVNLAWTAGNSNTRFGIAAKYQIDPDACFSAKVNNSSLIGLGYTQTLKPGIKLTLSALLDGKNVNAGGHKLGLGLEFQA

SEQ ID NO: 1017 - protein, 186 aa, Homo sapiens
LVGGRGVGGQVGATSGRPALQVLPLKLGTADTPSPFLPKSGTCRGPLGNSFSLKSRQPSVPAAARAGVSDPAVVFPGLKAPECTSGMYKETVYSAFNLLMHYPPPSGAGQHPQPQPPLVSGPRSQCRPVLAASLTSTRPISPPTVSPNSLSTNISTAHIPPLHLRTSARSKFTGLCRPLTSLASTP

SEQ ID NO: 1018 - protein, 128 aa, Homo sapiens
LGKVLGASGRGTGHCDLSGTPFAEACGFGHHFSLTAGLPVYPHPSVFLPQDSPHSPTLLLIFQHKANQPPHGVPQLSLYEHFNSPHPTPAPADISQKQVHRPLQTPDLSGFYSLTSGSMGQLPHTVSW

SEQ ID NO: 1019 - protein, 427 aa, Homo sapiens
LAAVAASGLNTMLEGNGQYTLLAPTNEAFEKIPSETLNRILGDPEALRDLLNNHILKSAMCAEAIVAGLSVETLEGTTLEVGCSGDMLTINGKAIISNKDILATNGVIHYIDELLIPDSAKTLFELAAESDVSTAIDLFRQAGLGNHLSGSERLTLLAPLNSVFKDGTPPIDAHTRNLLRNHIIKDQLASKYLYHGQTLETLGGKKLRVFVYRNSLCIENSCIAAHDKRGRYGTLFTMDRVLTPPMGTVMDVLKGDNRFSMLVAAIQSAGLTETLNREGVYTVFAPTNEAFRALPPRERSRLLGDAKELANILKYHIGDEILVSGGIGALVRLKSLQGDKLEVSLKNNVVSVNKEPVAEPDIMATNGVVHVITNVLQPPANRPQERGDELADSALEIFKQASAFSRASQRSVRLAPVYQKLLERMKH

SEQ ID NO: 1020 - protein, 630 aa, Homo sapiens
LGSRRRHPPPQPASAAAGPAPAPASAAAARPRPPAPRASRGRRLHASQCSPRPACNPARPPQLCPLQLQPRAAPPRPDTSSPACSSRMAAAKAEMQLMSPLQISDPFGSFPHSPTMDNYPKLEEMMLLSNGAPQFLGAAGAPEGSGSNSSSSSSGGGGGGGGGSNSSSSSSTFNPQADTGEQPYEHLTAESFPDISLNNEKVLVETSYPSQTTRLPPITYTGRFSLEPAPNSGNTLWPEPLFSLVSGLVSMTNPPASSSSAPSPAASSASASQSPPLSCAVPSNDSSPIYSAAPTFPTPNTDIFPEPQSQAFPGSAGTALQYPPPAYPAAKGGFQVPMIPDYLFPQQQGDLGLGTPDQKPFQGLESRTQQPSLTPLSTIKAFATQSGSQDLKALNTSYQSQLIKPSRMRKYPNRPSKTPPHERPYACPVESCDRRFSRSDELTRHIRIHTGQKPFQCRICMRNFSRSDHLTTHIRTHTGEKPFACDICGRKFARSDERKRHTKIHLRQKDKKADKSVVASSATSSLSSYPSPVATSYPSPVTTSYPSPATTSYPSPVPTSFSSPGSSTYPSPVHSGFPSPSVATTYSSVPPAFPAQVSSFPSSAVTNSFSASTGLSDMTATFSPRTIEIC

SEQ ID NO: 1021 - protein, 542 aa, Homo sapiens
LERGSRCPTSEPPPPRSRRRGGAAAAAQDWALREEEARRWRTTPVLPTGTWRSGRSRSSLRAWRRPAGERRVRHPPCPLGSRTPQDGRPRAAWPDEENQALANSRLLDLWVVAPDPGARVGAVGPRRGPFPAWGNGTSMISLIIPPKDQISRVAKMLADEFGTASNIKSRVNRLSVLGAITSVQQRLKLYNKVPPNGLVVYCGTIVTEEGKEKKVNIDFEPFKPINTSLYLCDNKFHTEALTALLSDDSKFGFIVIDGSGALFGTLQGNTREVLHKFTVDLPKKHGRGGQSALRFARLRMEKRHNYVRKVAETAVQLFISGDKVNVAGLVLAGSADFKTELSQSDMFDQRLQSKVLKLVDISYGGENGFNQAIELSTEVLSNVKFIQEKKLIGRYFDEISQDTGKYCFGVEDTLKALEMGAVEILIVYENLDIMRYVLHCQGTEEEKILYLTPEQEKDKSHFTDKETGQEHELIESMPLLEWFANNYKKFGATLEIVTDKSQEGSQFVKGFGGIGGILRYRVDFQGMEYQGGDDEFFDLDDY

SEQ ID NO: 1022 - protein, 194 aa, Homo sapiens
LAPGAMRLSLPLLLLLLGAWAIPGGLGDRAPLTATAPQLDDEEMYSAHMPAHLRCDACRAVAYQMWQNLAKAETKLHTSNSGGRRELSELVYTDVLDRSCSRNWQDYGVREVDQVKRLTGPGLSEGPEPSISVMVTGGPWPTRLSRTCLHYLGEFGEDQIYEAHQQGRGALEALLCGGPQGACSEKVSATREEL

SEQ ID NO: 1023 - protein, 81 aa, Homo sapiens
LAPGAMRLSLPLLLLLLGAWAIPGGLGDRAPLTATAPQLDDEEMYSAHMPAHLRCDACRAVAYQLRSSRSGPSETSHRPRT

SEQ ID NO: 1024 - protein, 80 aa, Homo sapiens
LAPGAMRLSLPLLLLLLGAWAIPGGLGDRAPLTATAPQLDDEEMYSAHMPAHLRCDACRAVAYQRLCSYPPHLPLTEQQS

SEQ ID NO: 1025 - protein, 67 aa, Homo sapiens
LAPGAMRLSLPLLLLLLGAWAIPGGLGDRAPLTATAPQLDDEEMYSAHMPAHLRCDACRAVAYQAHP

SEQ ID NO: 1026 - protein, 122 aa, Homo sapiens
LAPGAMRLSLPLLLLLLGAWAIPGGLGDRAPLTATAPQLDDEEMYSAHMPAHLRCDACRAVAYQVSPSPLSPCPAHTPSQARPLHPPHIPPPAFDPQSLPLGIKPQMQPFIYSMPQFTHLPA

SEQ ID NO: 1027 - protein, 154 aa, Homo sapiens
VISCFLLFFNLGRGEGEEGQVLQAPPPPRLGPAAAARLGLRTRALLAAGAERTAAVVPRAERSSLPRPSPSASRRRRRWRLGRLGEPSEDISTWTPDHVPALSSEAHQASLLWAAGPGPGLWTLGSWQAPSAVGSGPRPHHVEPRRWLPGCRRQ

SEQ ID NO: 1028 - protein, 1193 aa, Homo sapiens
LNLAHLAVSMMQLLQLLLGLLGPGGYLFLLGDCQEVTTLTVKYQVSEEVPSGTVIGKLSQELGREERRRQAGAAFQVLQLPQALPIQVDSEEGLLSTGRRLDREQLCRQWDPCLVSFDVLATGDLALIHVEIQVLDINDHQPRFPKGEQELEISESASLRTRIPLDRALDPDTGPNTLHTYTLSPSEHFALDVIVGPDETKHAELIVVKELDREIHSFFDLVLTAYDNGNPPKSGTSLVKVNVLDSNDNSPAFAESSLALEIQEDAAPGTLLIKLTATDPDQGPNGEVEFFLSKHMPPEVLDTFSIDAKTGQVILRRPLDYEKNPAYEVDVQARDLGPNPIPAHCKVLIKVLDVNDNIPSIHVTWASQPSLVSEALPKDSFIALVMADDLDSGHNGLVHCWLSQELGHFRLKRTNGNTYMLLTNATLDREQWPKYTLTLLAQDQGLQPLSAKKQLSIQISDINDNAPVFEKSRYEVSTRENNLPSLHLITIKAHDADLGINGKVSYRIQDSPVAHLVAIDSNTGEVTAQRSLNYEEMAGFEFQVIAEDSGQPMLASSVSVWVSLLDANDNAPEVVQPVLSDGKASLSVLVNASTGHLLVPIETPNGLGPAGTDTPPLATHSSRPFLLTTIVARDADSGANGEPLYSIRSGNEAHLFILNPHTGQLFVNVTNASSLIGSEWELEIVVEDQGSPPLQTRALLRVMFVTSVDHLRDSARKPGALSMSMLTVICLAVLLGIFGLILALFMSICRTEKKDNRAYNCREAESTYRQQPKRPQKHIQKADIHLVPVLRGQAGEPCEVGQSHKDVDKEAMMEAGWDPCLQAPFHLTPTLYRTLRNQGNQGAPAESREVLQDTVNLLFNHPRQRNASRENLNLPEPQPATGQPRSRPLKVAGSPTGRLAGDQGSEEAPQRPPASSATLRRQRHLNGKVSPEKESGPRQILRSLVRLSVAAFAERNPVEELTVDSPPVQQISQLLSLLHQGQFQPKPNHRGNKYLAKPGGSRSAIPDTDGPSARAGGQTDPEQEEGPLDPEEDLSVKQLLEEELSSLLDPSTGLALDRLSAPDPAWMARLSLPLTTNYRDNVISPDAAATEEPRTFQTFGKAEAPELSPTGTRLASTFVSEMSSLLEMLLEQRSSMPVEAASEALRRLSVCGRTLSLDLATSAASGMKVQGDPGGKTGTEGKSRGSSSSSRCL

SEQ ID NO: 1029 - protein, 51 aa, Homo sapiens
LHLHFPRLIRVATLATVVTDVWMFLNISEGVVEKNTHSANHLYELNVSEVY

SEQ ID NO: 1030 - protein, 62 aa, Homo sapiens
LLRCRILCYATALQLTFSCLASVRPEAPRPPCTSLSSGTELCQAPEPPGRARAAVGVEGAFT

SEQ ID NO: 1031 - protein, 67 aa, Homo sapiens
LEMFCLLTLSFFSFHSEMAPRKGKEKKEEQVISLGPQVAEGENVFGVCHIFASFNDTFVHVTDLSGK

SEQ ID NO: 1032 - protein, 58 aa, Homo sapiens
VLMEMLKASKPLRPALRLQKPSIHSWGAGHARELPIASALLRGPGLDGGWYLPTPFSF

SEQ ID NO: 1033 - protein, 325 aa, Homo sapiens
LAPKLRKDKDFGDVFSGRTELKNKVPACRHPMEDSMDMDMSPLRPQNYLFGCELKADKDYHFKVDNDENEHQLSLRTVSLGAGAKDELHIVEAEAMNYEGSPIKVTLATLKMSVQPTVSLGGFEITPPVVLRLKCGSGPVHISGQHLVAVEEDAESEDEEEEDVKLLSISGKRSAPGGGSKVPQKKVKLAADEDDDDDDEEDDDEDDDDDDFDDEEAEEKAPVKKSIRDTPAKNAQKSNQNGKDSKPSSTPRSKGQESFKKQEKTPKTPKGPSSVEDIKAKMQASIEKGGSLPKVEAKFINYVKNCFRMTDQEAIQDLWQWRKSL

SEQ ID NO: 1034 - protein, 373 aa, Homo sapiens
VGLKSACAGRLRYGGGRASEHARGGGTWEALARSSGSIYKRGEPASFPWCDSVLRGCSLEQRSFISVRLLSYLSACRHPMEDSMDMDMSPLRPQNYLFGCELKADKDYHFKVDNDENEHQLSLRTVSLGAGAKDELHIVEAEAMNYEGSPIKVTLATLKMSVQPTVSLGGFEITPPVVLRLKCGSGPVHISGQHLVAVEEDAESEDEEEEDVKLLSISGKRSAPGGGSKVPQKKVKLAADEDDDDDDEEDDDEDDDDDDFDDEEAEEKAPVKKSIRDTPAKNAQKSNQNGKDSKPSSTPRSKGQESFKKQEKTPKTPKGPSSVEDIKAKMQASIEKGGSLPKVEAKFINYVKNCFRMTDQEAIQDLWQWRKSL

SEQ ID NO: 1035 - protein, 285 aa, Homo sapiens
LRGCSLEQRSFISVRLLSYLSACRHPMEDSMDMDMSPLRPQNYLFGCELKADKDYHFKVDNDENEHQLSLRTVSLGAGAKDELHIVEAEAMNYEGSPIKVTLATLKMSVQPTVSLGGFEITPPVVLRLKCGSGPVHISGQHLVAVEEDAESEDEEEEDVKLLSISGKRSAPGGGSKVPQKKVKLAADEDDDDDDEEDDDEDDDDDDFDDEEAEEKAPVKKSIRDTPAKNAQKSNQNGKDSKPSSTPRSKGQESFKKQEKTPKTPKGPSSVEDIKAKMQASIEKAH

SEQ ID NO: 1036 - protein, 291 aa, Homo sapiens
LRGCSLEQRSFISVRLLSYLSACRHPMEDSMDMDMSPLRPQNYLFGCELKADKDYHFKVDNDENEHQLSLRTVSLGAGAKDELHIVEAEAMNYEGSPIKVTLATLKMSVQPTVSLGGFEITPPVVLRLKCGSGPVHISGQHLVAVEEDAESEDEEEEDVKLLSISGKRSAPGGGSKVPQKKVKLAADEDDDDDDEEDDDEDDDDDDFDDEEAEEKAPVKKGQESFKKQEKTPKTPKGPSSVEDIKAKMQASIEKGGSLPKVEAKFINYVKNCFRMTDQEAIQDLWQWRKSL

SEQ ID NO: 1037 - protein, 181 aa, Homo sapiens
LEQRSFISVRLLSYLSACRHPMEDSMDMDMSPLRPQNYLFGCELKADKDYHFKVDNDENEHQLSLRTVSLGAGAKDELHIVEAEAMNYEGSPIKVTLATLKMSVQPTVSLGGFEITPPVVLRLKCGSGPVHISGQHLVAVEEDAESEDEEEEDVKLLSISGKRSAPGGGSKVPQVEMAILL

SEQ ID NO: 1038 - protein, 245 aa, Homo sapiens
VWPSPLTTGRLSLDLEIKPSSYGIPWVCANTLSRLECSSAISAHCKLCFPGSRHSPASASRVAGTTGACHQDESHSEWVSCVRFSPNSSNPIIVSCGWDKLVKVWNLANCKLKTNHIGHTGYLNTVTVSPDGSLCASGGKDGQAMLWDLNEGKHLYTLDGGDIINALCFSPNRYWLCAATGPSIKIWDLEGKIIVDELKQEVISTSSKAEPPQCTSLAWSADGQTLFAGYTDNLVRVWQVTIGTR

SEQ ID NO: 1039 - protein, 271 aa, Homo sapiens
MRPTMEFHSVLCGVTPTLLVMWLSPQMASLPSQAPGMEPCASGISQRKGTTTRRFVGHTKDVLSVAFSSDNRQIVSGSRDKTIKLWNTLGVCKYTVQDESHSEWVSCVRFSPNSSNPIIVSCGWDKLVKVWNLANCKLKTNHIGHTGYLNTVTVSPDGSLCASGGKDGQAMLWDLNEGKHLYTLDGGDIINALCFSPNRYWLCAATGPSIKIWDLEGKIIVDELKQEVISTSSKAEPPQCTSLAWSADGQTLFAGYTDNLVRVWQVTIGTR

SEQ ID NO: 1040 - protein, 271 aa, Homo sapiens
LRLLLGSALVGRLLDSLKRDYAGKPQPPIKSERRNPPSYAMAGKKVLIVYAHQEPKSFNGSLKNVAVDELSRQGCTVTVSDLYAMNLEPRATDKDITGTLSNPEVFNYGVETHEAYKQRSLASDITDEQKKVREADLVIFQFPLYWFSVPAILKGWMDRVLCQGFAFDIPGFYDSGLLQGKLALLSVTTGGTAEMYTKTGVNGDSRYFLWPLQHGTLHFCGFKVLAPQISFAPEIASEEERKGMVAAWSQRLQTIWKEEPIPCTAHWHFGQ

SEQ ID NO: 1041 - protein, 233 aa, Homo sapiens
LRLLLGSALVGRLLDSLKRDYAGKPQPPIKSERRNPPSYAMAGKKVLIVYAHQEPKSFNGSLKNVAVDELSRQGCTVTVSDLYAMNLEPRATDKDITGTLSNPEVFNYGVETHEAYKQRSLASDITDEQKKVREADLVIFQGKLALLSVTTGGTAEMYTKTGVNGDSRYFLWPLQHGTLHFCGFKVLAPQISFAPEIASEEERKGMVAAWSQRLQTIWKEEPIPCTAHWHFGQ

SEQ ID NO: 1042 - protein, 51 aa, Homo sapiens
LMYLPEKAELEKGGARERVKRKRCRMPGDCLPLAVHSHSREDGIIYNPAHG

SEQ ID NO: 1043 - protein, 175 aa, Homo sapiens
MGPRARPALLLLMLLQTAVLQGRLLRSHSLHYLFMGASEQDLGLSLFEALGYVDDQLFVFYDHESRRVEPRTPWVSSRISSQMWLQLSQSLKGWDHMFTVDFWTIMENHNHSKGMWRGGLTFLRLSELFIFSCILKETAGSLRSCGSREEGRNLLPEIIWSLGMVEIGTYSFGCS

SEQ ID NO: 1044 - protein, 175 aa, Homo sapiens
MGPRARPALLLLMLLQTAVLQGRLLRSHSLHYLFMGASEQDLGLSLFEALGYVDDQLFVFYDHESRRVEPRTPWVSSRISSQMWLQLSQSLKGWDHMFTVDFWTIMENHNHSKEGSESSSLPGKGKQIPSPHPSSFLSSASFGEGDTSCDLFSDHSTVSGLELLPPEHHHEVAEG

SEQ ID NO: 1045 - protein, 115 aa, Homo sapiens
LFQFIPSTAIGIMSGRGKGGKGLGKGGAKRHRKVLRDNIQGITKPAIRRLARRGGVKRISGLIYEETRGVLKVFLENVIRDAVTYTEHAKRKTVTAMDVVYALKRQGRTLYGFGG

SEQ ID NO: 1046 - protein, 15 aa, Homo sapiens
LFSRELRPLVLVIFV

SEQ ID NO: 1047 - protein, 133 aa, Homo sapiens
LIAMSGRGKQGGKARAKAKSRSSRAGLQFPVGRVHRLLRKGNYAERVGAGAPVYLAAVLEYLTAEILELAGNAARDNKKTRIIPRHLQLAIRNDEELNKLLGRVTIAQGGVLPNIQAVLLPKKTESHHKAKGK

SEQ ID NO: 1048 - protein, 228 aa, Homo sapiens
LLSLTLAFNMSETAPAAPAAPAPAEKTPVKKKARKSAGAAKRKASGPPVSELITKAVAASKERSGVSLAALKKALAAAGYDVEKNNSRIKLGLKSLVSKGTLVQTKGTGASGSFKLNKKAASGEAKPKAKKAGAAKAKKPAGAAKKPKKATGAATPKKSAKKTPKKAKKPAAAAGAKKAKSPKKAKAAKPKKAPKSPAKAKAVKPKAAKPKTAKPKAAKPKKAAAKKK

SEQ ID NO: 1049 - protein, 133 aa, Homo sapiens
LQNSKDSMPEPAKSAPAPKKGSKKAVTKAQKKDGKKRKRSRKESYSVYVYKVLKQVHPDTGISSKAMGIMNSFVNDIFERIAGEASRLAHYNKRSTITSREIQTAVRLLLPGELAKHAVSEGTKAVTKYTSSK

SEQ ID NO: 1050 - protein, 119 aa, Homo sapiens
VCSKVAKVKSCCLSSIMSGRGKGGKGLGKGGAKRHRKVLRDNIQGITKPAIRRLARRGGVKRISGLIYEETRGVLKVFLENVIRDAVTYTEHAKRKTVTAMDVVYALKRQGRTLYGFGG

SEQ ID NO: 1051 - protein, 332 aa, Homo sapiens
MKMASFLAFLLLNFRVCLLLLQLLMPHSAQFSVLGPSGPILAMVGEDADLPCHLFPTMSAETMELKWVSSSLRQVVNVYADGKEVEDRQSAPYRGRTSILRDGITAGKAALRIHNVTASDSGKYLCYFQDGDFYEKALVELKVAALGSDLHVDVKGYKDGGIHLECRSTGWYPQPQIQWSNNKGENIPTVEAPVVADGVGLYAVAASVIMRGSSGEGVSCTIRSSLLGLEKTASISIADPFFRSAQRWIAALAGTLPVLLLLLGGAGYFLWQQQEEKKTQFRKKKREQELREMAWSTMKQEQSTRVKLLEELSKFPFPQRPRHVFLSLLYAP

SEQ ID NO: 1052 - protein, 110 aa, Homo sapiens
LFSDHLIMSGRGKGGKGLGKGGAKRHRKVLRDNIQGITKPAIRRLARRGGVKRISGLIYEETRGVLKVFLENVIRDAVTYTEHAKRKTVTAMDVVYALKRQGRTLYGFGG

SEQ ID NO: 1053 - protein, 319 aa, Homo sapiens
MVVMAPRTLFLLLSGALTLTETWAGSHSMRYFSAAVSRPGRGEPRFIAMGYVDDTQFVRFDSDSACPRMEPRAPWVEQEGPEYWEEETRNTKAHAQTDRMNLQTLRGYYNQSEASSHTLQWMIGCDLGSDGRLLRGYEQYAYDGKDYLALNEDLRSWTAADTAAQISKRKCEAANVAEQRRAYLEGTCVEWLHRYLENGKEMLQRADPPKTHVTHHPVFDYEATLRCWALGFYPAEIILTWQRDGEDQTQDVELVETRPAGDGTFQKWAAVVVPSGEEQRYTCHVQHEGLPEPLMLRWSKEGDGGIMSVRESRSLSEDL

SEQ ID NO: 1054 - protein, 429 aa, Homo sapiens
LANMFWEVISDEHGIDPTGTYHGDSDLQLDRISVYYNEATGGKYVPRAILVDLEPGTMDSVRSGPFGQIFRPDNFVFGQSGAGNNWAKGHYTEGAELVDSVLDVVRKEAESCDCLQGFQLTHSLGGGTGSGMGTLLISKIREEYPDRIMNTFSVVPSPKVSDTVVEPYNATLSVHQLVENTDETYCIDNEALYDICFRTLKLTTPTYGDLNHLVSATMSGVTTCLRFPGQLNADLRKLAVNMVPFPRLHFFMPGFAPLTSRGSQQYRALTVPELTQQVFDAKNMMAACDPRHGRYLTVAAVFRGRMSMKEVDEQMLNVQNKNSSYFVEWIPNNVKTAVCDIPPRGLKMAVTFIGNSTAIQELFKRISEQFTAMFRRKAFLHWYTGEGMDEMEFTEAESNMNDLVSEYQQYQDATAEEEEDFGEEAEEEA

SEQ ID NO: 1055 - protein, 72 aa, Homo sapiens [sequence omitted]

SEQ ID NO: 1056 - protein, 39 aa, Homo sapiens
LAIKGVLCVPGMVLLWCPWCDPSPAGNSLREVGPLHQCC

SEQ ID NO: 1057 - protein, 155 aa, Homo sapiens
MSWKKALRIPGDLRVATVTLMLAMLSSLLAEGRDSPEDFVFQFKGMCYFTNGTERVRLVTRYIYNREEYARFDSDVGVYRAVTPQGRPDAEYWNSQKEVLEGTRAELDTVCRHNYEVAFRGILQRRGERRRPSVRPTLGRDPEFLCREGRWGRGL

SEQ ID NO: 1058 - protein, 143 aa, Homo sapiens
MITFLPLLLGLSLGCTGAGGFVAHVESTCLLDDAGTPKDFTYCISFNKDLLTCWDPEENKMAPCEFGVLNSLANVLSQHLNQKDTLMQRLRNGLQNCATHTQPFWGSLTNRTREERGVQRGYQEVQLGGQAREDPTVAQGFEI

SEQ ID NO: 1059 - protein, 144 aa, Homo sapiens
MSLVIPEKFQHILRVLNTNIDGRRKIAFAITAIKGVGRRYAHVVLRKADIDLTKRAGELTEDEVERVITIMQNPRQYKIPDWFLNRQKDVKDGKYSQVCTEMRAGLEEGWRVLTELGIGGQGIKHPLPPPLNPGPSQWSGQQAP

SEQ ID NO: 1060 - protein, 69 aa, Homo sapiens
LAWAGPSTGCTLLLVPLPLSACHFSLCACVLPVSGPQDKVRQSLQQQHHKEAKAKPTGARPSALDRFVR

SEQ ID NO: 1061 - protein, 177 aa, Homo sapiens
LGLRAGAISGAGAAPRRHPHLLPAAAAAEPGRSSAPSTAAPGNPERAPQAGGRARASQPSLFHLLLREGKMSESSSKSSQPLASKQEKDGTEKRGRGRPRKQPPVSPGTALVGSQKEPSEVPTPKRPRGRPKGSKNKGAAKTRKTTTTPGRKPRGRPKKLEKEEEEGISQESSEEEQ

SEQ ID NO: 1062 - protein, 180 aa, Homo sapiens
LGGEHAAAAVSERLCSLPVSDPHLLPAAAAAEPGRSSAPSTAAPGNPERAPQAGGRARASQPSLFHLLLREGKMSESSSKSSQPLASKQEKDGTEKRGRGRPRKQPPVSPGTALVGSQKEPSEVPTPKRPRGRPKGSKNKGAAKTRKTTTTPGRKPRGRPKKLEKEEEEGISQESSEEEQ

SEQ ID NO: 1063 - protein, 225 aa, Homo sapiens
LSALSLLSRSSKVSRDTLYEAVREVLHGNQRKRRKFLETVELQISLKNYDPQKDKRFSGTVRLKSTPRPKFSVCVLGDQQHCDEAKAVDIPHMDIEALKKLNKNKKLVKKLAKKYDAFLASESLIKQIPRILGPGLNKAGKFPSLLTHNENMVAKVDEVKSTIKFQMKKVLCLAVAVGHVKMTDDELVYNIHLAVNFLVSLLKKNWQNVRALYIKSTMGKPQRLY

SEQ ID NO: 1064 - protein, 178 aa, Homo sapiens
LVAILSLGCLFSGAMSEPAGDVRQNPCGSKACRRLFGPVDSEQLSRDCDALMAGCIQEARERWNFDFVTETPLEGDFAWERVRGLGLPKLYLPTGPRRGRDELGGGRRPGTSPALLQGTAEEDHVDLSLSCTLVPRSGEQAEGSPGGPGDSQGRKRRQTSMTDFYHSKRRLIFSKRKP

SEQ ID NO: 1065 - protein, 11 aa, Homo sapiens
MPLPPLQRSTP

SEQ ID NO: 1066 - protein, 11 aa, Homo sapiens
LCVLIIICVLI

SEQ ID NO: 1067 - protein, 507 aa, Homo sapiens
LCESGWASNTAPTAPPQPGWCLCGKDFKSSCQTPGREKERRLATMHGSCSFLMLLLPLLLLLVATTGPVGALTDEEKRLMVELHNLYRAQVSPTASDMLHMRWDEELAAFAKAYARQCVWGHNKERGRRGENLFAITDEGMDVPLAMEEWHHEREHYNLSAATCSPGQMCGHYTQVVWAKTERIGCGSHFCEKLQGVEETNIELLVCNYEPPGNVKGKRPYQEGTPCSQCPSGYHCKNSLCEPIGSPEDAQDLPYLVTEAPSFRATEASDSRKMGTPSSLATGIPAFLVTEVSGSLATKALPAVETQAPTSLATKDPPSMATEAPPCVTTEVPSILAAHSLPSLDEEPVTFPKSTHVPIPKSADKVTDKTKVPSRSPENSLDPKMSLTGARELLPHAQEEAEAEAELPPSSEVLASVFPAQDKPGELQATLDHTGHTSSKSLPNFPNTSATANATGGRALALQSSLPGAEGPDKPSVVSGLNSGPGHVWGPLLGLLLLPPLVLAGIF

SEQ ID NO: 1068 - protein, 383 aa, Homo sapiens
LGPALTMPSGCRCLHLVCLLCILGAPGQPVRADDCSSHCDLAHGCCAPDGSCRCDPGWEGLHCERCVRMPGCQHGTCHQPWQCICHSGWADEHICTTQSPCQNGGQCMYDGGGEYHCVCLPGFHGRDCERKAGPCEQAGSPCRNGGQCQDDQGFALNFTCRCLVGFVGARCEVNVDDCLMRPCANGATCLDGINRFSCLCPEGFAGRFCTINLDDCASRPCQRGARCRDRVHDFDCLCPSGYGGKTCELVLPVPDPPTTVDTPLGPTSAVVVPATGPAPHSAGAGLLRISVKEVVRRQEAGLGEPSLVALVVFGALTAALVLATVLLTLRAWRRGVCPPGPCCYPAPHYAPACQDQECQVSMLPAGLPLPRDLPPEPGKTTAL

SEQ ID NO: 1069 - protein, 389 aa, Homo sapiens
LGPALTMPSGCRCLHLVCLLCILGAPGQPVRADDCSSHCDLAHGCCAPDGSCRCDPGWEGLHCERCVRMPGCQHGTCHQPWQCICHSGWAGKFCDKDEHICTTQSPCQNGGQCMYDGGGEYHCVCLPGFHGRDCERKAGPCEQAGSPCRNGGQCQDDQGFALNFTCRCLVGFVGARCEVNVDDCLMRPCANGATCLDGINRFSCLCPEGFAGRFCTINLDDCASRPCQRGARCRDRVHDFDCLCPSGYGGKTCELVLPVPDPPTTVDTPLGPTSAVVVPATGPAPHSAGAGLLRISVKEVVRRQEAGLGEPSLVALVVFGALTAALVLATVLLTLRAWRRGVCPPGPCCYPAPHYAPACQDQECQVSMLPAGLPLPRDLPPEPGKTTAL

SEQ ID NO: 1070 - protein, 104 aa, Homo sapiens
VERLKMAASQAVEEMRSRVVLGEFGVRNVHTTDFPGNYSGYDDAWDQDRFEKNFRVDVVHMDENSLEFDMVGIDAAIANAFRRILLAEVLAGMVTRLELLWELH

SEQ ID NO: 1071 - protein, 155 aa, Homo sapiens
VERLKMAASQAVEEMRSRVVLGEFGVRNVHTTDFPGNYSGYDDAWDQDRFEKNFRVDVVHMDENSLEFDMVGIDAAIANAFRRILLAEVPTMAVEKVLVYNNTSIVQDEILAHRLGLIPIHADPRLFEYRNQGEKMKFWEKWTIWVQILVDCDVG

SEQ ID NO: 1072 - protein, 301 aa, Homo sapiens
VERLKMAASQAVEEMRSRVVLGEFGVRNVHTTDFPGNYSGYDDAWDQDRFEKNFRVDVVHMDENSLEFDMVGIDAAIANAFRRILLAEVPTMAVEKVLVYNNTSIVQDEILAHRLGLIPIHADPRLFEYRNQGDEEGTEIDTLQFRLQVRCTRNPHAAKDSSDPNELYVNHKVYTRHMTWIPLGNQADLFPEGTIRPVHDDILIAQLRPGQEIDLLMHCVKGIGKKVARVANPRLDTFSREIFRNEKLKKVVRLARVRDHYIFSVESTGVLPPDVLVSEAIKVLMGKCRRFLDELDAVQMD

SEQ ID NO: 1073 - protein, 347 aa, Homo sapiens
VERLKMAASQAVEEMRSRVVLGEFGVRNVHTTDFPGNYSGYDDAWDQDRFEKNFRVDVVHMDENSLEFDMVGIDAAIANAFRRILLAEVPTMAVEKVLVYNNTSIVQDEILAHRLGLIPIHADPRLFEYRNQGDEEGTEIDTLQFRLQVRCTRNPHAAKDSSDPNELYVNHKVYTRHMTWIPLGNQADLFPEGTIRPVHDDILIAQLRPGQEIDLLMHCVKGIGKDHAKFSPVATASYRLLPDITLLEPVEGEAAEELSRCFSPGVIEVQEVQGKKVARVANPRLDTFSREIFRNEKLKKVVRLARVRDHYICKKDLLAAVAHTCNPSTLGGQGEWITGSRERDHPG

SEQ ID NO: 1074 - protein, 1262 aa, Homo sapiens
VRSAGFFPARVAANAPPPASHPRRPPRPGTNGWSRRGSCRASWSRDCSGVRSRRVALGMAMDQVNALCEQLVKAVTVMMDPNSTQRYRLEALKFCEEFKEKCPICVPCGLRLAEKTQVAIVRHFGLQILEHVVKFRWNGMSRLEKVYLKNSVMELIANGTLNILEEENHIKDALSRIVVEMIKREWPQHWPDMLIELDTLSKQGETQTELVMFILLRLAEDVVTFQTLPPQRRRDIQQTLTQNMERIFSFLLNTLQENVNKYQQVKTDTSQESKAQANCRVGVAALNTLAGYIDWVSMSHITAENCKLLEILCLLLNEQELQLGAAECLLIAVSRKGKLEDRKPLMVLFGDVAMHYILSAAQTADGGGLVEKHYVFLKRLCQVLCALGNQLCALLGADSDVETPSNFGKYLESFLAFTTHPSQFLRSSTQMTWGALFRHEILSRDPLLLAIIPKYLRASMTNLVKMGFPSKTDSPSCEYSRFDFDSDEDFNAFFNSSRAQQGEVMRLACRLDPKTSFQMAGEWLKYQLSTFLDAGSVNSCSAVGTGEGSLCSVFSPSFVQWEAMTLFLESVITQMFRTLNREEIPVNDGIELLQMVLNFDTKDPLILSCVLTNVSALFPFVTYRPEFLPQVFSKLFSSVTFETVEESKAPRTRAVRNVRRHACSSIIKMCRDYPQLVLPNFDMLYNHVKQLLSNELLLTQMEKCALMEALVLISNQFKNYERQKVFLEELMAPVASIWLSQDMHRVLSDVDAFIAYVGTDQKSCDPGLEDPCGLNRARMSFCVYSILGVVKRTCWPTDLEEAKAGGFVVGYTSSGNPIFRNPCTEQILKLLDNLLALIRTHNTLYAPEMLAKMAEPFTKALDMLDAEKSAILGLPQPLLELNDSPVFKTVLERMQRFFSTLYENCFHILGKAGPSMQQDFYTVEDLATQLLSSAFVNLNNIPDYRLRPMLRVFVKPLVLFCPPEHYEALVSPILGPLFTYLHMRLSQKWQVINQRSLLCGEDEAADENPESQEMLEEQLVRMLTREVMDLITVCCVSKKGADHSSAPPADGDDEEMMATEVTPSAMAELTDLGKCLMKHEDVCTALLITAFNSLAWKDTLSCQRTTSQLCWPLLKQVLSGTLLADAVTWLFTSVLKGLQMHGQHDGCMASLVHLAFQIYEALRPRYLEIRAVMEQIPEIQKDSLDQFDCKLLNPSLQKVADKRRKDQFKRLIAGCIGKPLGEQFRKEVHIKNLPSLFKKTKPMLETEVLDNDGGGLATIFEP

SEQ ID NO: 1075 - protein, 28 aa, Homo sapiens
VLGLSGYRKASLRCSLLRIILFFSRFLF

SEQ ID NO: 1076 - protein, 479 aa, Homo sapiens
LKMTSKFLLVSFILAALSLSTTFSLQPDQQKVLLVSFDGFRWDYLYKVPTPHFHYIMKYGVHVKQVTNVFITKTYPNHYTLVTGLFAENHGIVANDMFDPIRNKSFSLDHMNIYDSKFWEEATPIWITNQRAGHTSGAAMWPGTDVKIHKRFPTHYMPYNESVSFEDRVAKIIEWFTSKEPINLGLLYWEDPDDMGHHLGPDSPLMGPVISDIDKKLGYLIQMLKKAKLWNTLNLIITSDHGMTQCSEERLIELDQYLDKDHYTLIDQSPVAAILPKEGKFDEVYEALTHAHPNLTVYKKEDVPERWHYKYNSRIQPIIAVADEGWHILQNKSDDFLLGNHGYDNALADMHPIFLAHGPAFRKNFSKEAMNSTDLYPLLCHLLNITAMPHNGSFWNVQDLLNSAMPRVVPYTQSTILLPGSVKPAEYDQEGSYPYFIGVSLGSIIVIVFFVIFIKHLIHSQIPALQDMHAEIAQPLLQA

SEQ ID NO: 1077 - protein, 572 aa, Homo sapiens
LELEVELRGAGPPAAGQRLLQAEAPAENEPEPEVVVVSWQSGGTGSKLRWFTTLMLCASFLGLGLSVAIVGPTFQDLATNVNRNISSLSFIFVGRALGYLSGSVIGGFLVDVMNYFLLLGISMSATTVGLYLVPFCKTAILLTVMMSIFGVSIGILDTGGNVLILAIWGDKGAPHMQALHFSFALGAFLAPLLAKLALGPTASAENHTESDFHPALNQSSDADSEALFGVPNDKNLLWAYAVIGTYMFLVSVIFFCLFLKNSSKQEKARASAETFRRAKYHNALLCLLFLFFFFYVGAEVTYGSYVFSFATTHAGMKESEAAGLNSIFWGTFAACRGLAIFFATCLQPGTMIVLSNIGSLTSSLFLVLFDKNPICLWIATSVYGASMATTFPSGVSWIEQYTTIHGKSAAFFVIGASLGEMAIPAVIGILQGKYPDLPVVLYTSLGASIATGILFPVLYKLATSPLDRQRKEDRKSEDQKALLSSSGLNEYEEENEEEDAEKWNEMDFEMIETNDTMRHSIIETSRSSLTEPTAEVYNQYPSNALVFESSPFNTGSAHVKHLPETRTKGTNV

SEQ ID NO: 1078 - protein, 286 aa, Homo sapiens
LEAWMNVLPLLTAIEFHSAWAMGMGVNLLVANTHHVSLNMTGSGIYAPNGPKVYHYDMKTELGKLLLSEVDSHPLSSLAYPTAVNWNAYATTIKPFPVQKNTFRGFISRDGFNFTELFENAGNLTVCQKELCCHLSYRMLQKEENEVYVLGAFTGLHGRRRREYWQVCTLLKCKTTNLTTCGRPVETASTRFEMFSLSGTFGTEYVFPEVLLTEIHLSPGKFEVLKDGRLVNKNGSSGPILTVSLFGRWYTKDSLYSSCGTSNSAITYLLIFILLMIIALQNIVML

SEQ ID NO: 1079 - protein, 522 aa, Homo sapiens
LAMVTSSFPISVAVFALITLQVGTQDSFIAAVYEHAVILPNKTETPVSQEDALNLMNENIDILETAIKQAAEQGARIIVTPEDALYGWKFTRETVFPYLEDIPDPQVNWIPCQDPHRFGHTPVQARLSCLAKDNSIYVLANLGDKKPCNSRDSTCPPNGYFQYNTNVVYNTEGKLVARYHKYHLYSEPQFNVPEKPELVTFNTAFGRFGIFTCFDIFFYDPGVTLVKDFHVDTILFPTAWMNVLPLLTAIEFHSAWAMGMGVNLLVANTHHVSLNMTGSGIYAPNGPKVYHYDMKTELGKLLLSEVDSHPLSSLAYPTAVNWNAYATTIKPFPVQKNTFRGFISRDGFNFTELFENAGNLTVCQKELCCHLSYRMLQKEENEVYVLGAFTGLHGRRRREYWQVCTLLKCKTTNLTTCGRPVETASTRFEMFSLSGTFGTEYVFPEVLLTEIHLSPGKFEVLKDGRLVNKNGSSGPILTVSLFGRWYTKDSLYSSCGTSNSAITYLLIFILLMIIALQNIVML

SEQ ID NO: 1080 - protein, 292 aa, Homo sapiens
LAMVTSSFPISVAVFALITLQVGTQDSFIAAVYEHAVILPNKTETPVSQEDALNLMNENIDILETAIKQAAEQGARIIVTPEDALYGWKFTRETVFPYLEDIPDPQVNWIPCQDPHRFGHTPVQARLSCLAKDNSIYVLANLGDKKPCNSRDSTCPPNGYFQYNTNVVYNTEGKLVARYHKYHLYSEPQFNVPEKPELVTFNTAFGRFGIFTCFDIFFYDPGVTLVKDFHVDTILFPTAWMNVLPLLTAIEFHSAWAMGMGVNLLVANTHHVSLNMTVVFMHQMVPKCIIMT

SEQ ID NO: 1081 - protein, 77 aa, Homo sapiens
MAEEGIAAGGVMDVNTALQEVLKTALIHDGLARGIREAAKALDKYVYQSQYCGFLQPEQNCHPREEGMEFMVLAQKF

SEQ ID NO: 1082 - protein, 50 aa, Homo sapiens
LQPRMTLFCLLQLFYHLQRERCFLEPRARFYAAEIASALGYLHSLNIVYR

SEQ ID NO: 1083 - protein, 708 aa, Homo sapiens
LLFPASFLSSLFLLSFLPSDTTPKMEANHSEQLSAERQSTPPGDSSSLPSHNGLEKEDGQDSPTPVQPPEKEASVHPDISEELNRQLEDIINTYGSAASTAGKEGSARASEQPENAESPDNEDGDCEETTEEAGREPVASGEPPTVKEPVSNKEQKLEKKILKGLGKEANLLMQNLNKLQTPEEKFDFLFKKYAELLDEHRTEQKKLKLLQKKQVQIQKEKDQLQGEHSRAILARSKLESLCRELQRHNKTLKEEALQRAREEEEKRKEITSHFQSTLTDIQGQIEQQSERNMKLCQENTELAEKLKSIIDQYELREEHLDKIFKHRELQQKLVDAKLEQAQEMMKEAEERHKREKEYLLNQAAEWKLQAKVLKEQETVLQAQLTLYSGRFEEFQSTLTKSNEVFATFKQEMDKTTKKMKKLEKDTATWKARFENCNKALLDMIEEKALRAKEYECFVMKIGRLENLCRALQEERNELHKKIRDAEISEKDDQSQHNSDEEPESNVSVDQEIDAEEVNSVQTAVKNLATAFMIIHHPESTPHQSKETQPEIGSSQESADAALKEPEQPPLIPSRDSESPLPPLTPQAEAEGGSDAEPPSKASNSPAGLGAETQCEGLPVGAQADQASWKPEAEASGQAPQAPTEASLQKMEADVPAPACAAEEHVAAMVPACEPSRQPPRAAAEELPVGASAGPQPRNVADTNLEGVD

SEQ ID NO: 1084 - protein, 33 aa, Homo sapiens
VRGPGGPLGTGRDMNAWKSGWERTHDRRTKGAA

SEQ ID NO: 1085 - protein, 1061 aa, Homo sapiens
LSGTAYQTKVPKAVTSRPAARRPPPSARHGRRVQCPLGAPGTRRKRQVLPAAAAAAAACSPGTRPAALGSRSSVSPENQPSRAMGTRLPLVLRQLRRPPQPPGPPRRLRVPCRASSGGGGGGGGGREGLLGQRRPQDGQARSSCSPGGRTPAARDSIVREVIQNSKEVLSLLQEKNPAFKPVLAIIQAGDDNLMQEINQNLAEEAGLNITHICLPPDSSEAEIIDEILKINEDTRVHGLALQISENLFSNKVLNALKPEKDVDGVTDINLGKLVRGDAHECFVSPVAKAVIELLEKSGVNLDGKKILVVGAHGSLEAALQCLFQRKGSMTMSIQWKTRQLQSKLHEADIVVLGSPKPEEIPLTWIQPGTTVLNCSHDFLSGKVGCGSPRIHFGGLIEEDDVILLAAALRIQNMVSSGRRWLREQQHRRWRLHCLKLQPLSPVPSDIEISRGQTPKAVDVLAKEIGLLADEIEIYGKSKAKVRLSVLERLKDQADGKYVLVAGITPTPLGEGKSTVTIGLVQALTAHLNVNSFACLRQPSQGPTFGVKGGAAGGGYAQVIPMEEFNLHLTGDIHAITAANNLLAAAIDTRILHENTQTDKALYNRLVPLVNGVREFSEIQLARLKKLGINKTDPSTLTEEEVSKFARLDIDPSTITWQRVLDTNDRFLRKITIGQGNTEKGHYRQAQFDIAVASEIMAVLALTDSLADMKARLGRMVVASDKSGQPVTADDLGVTGALTVLMKDAIKPNLMQTLEGTPVFVHAGPFANIAHGNSSVLADKIALKLVGEEGFVVTEAGFGADIGMEKFFNIKCRASGLVPNVVVLVATVRALKMHGGGPSVTAGVPLKKEYTEENIQLVADGCCNLQKQIQITQLFGVPVVVALNVFKTDTRAEIDLVCELAKRAGAFDAVPCYHWSVGGKGSVDLARAVREAASKRSRFQFLYDVQVPIVDKIRTIAQAVYGAKDIELSPEAQAKIDRYTQQGFGNLPICMAKTHLSLSHQPDKKGVPRDFILPISDVRASIGAGFIYPLVGTMSTMPGLPTRPCFYDIDLDTETEQVKGLF

SEQ ID NO: 1086 - protein, 921 aa, Homo sapiens
VRSRPPALMQSRRARPRREVIQNSKEVLSLLQEKNPAFKPVLAIIQAGDDNLMQEINQNLAEEAGLNITHICLPPDSSEAEIIDEILKINEDTRVHGLALQISENLFSNKVLNALKPEKDVDGVTDINLGKLVRGDAHECFVSPVAKAVIELLEKSVGVNLDGKKILVVGAHGSLEAALQCLFQRKGSMTMSIQWKTRQLQSKLHEADIVVLGSPKPEEIPLTWIQPGTTVLNCSHDFLSGKVGCGSPRIHFGGLIEEDDVILLAAALRIQNMVSSGRRWLREQQHRRWRLHCLKLQPLSPVPSDIEISRGQTPKAVDVLAKEIGLLADEIEIYGKSKAKVRLSVLERLKDQADGKYVLVAGITPTPLGEGKSTVTIGLVQALTAHLNVNSFACLRQPSQGPTFGVKGGAAGGGYAQVIPMEEFNLHLTGDIHAITAANNLLAAAIDTRILHENTQTDKALYNRLVPLVNGVREFSEIQLARLKKLGINKTDPSTLTEEEVSKFARLDIDPSTITWQRVLDTNDRFLRKITIGQGNTEKGHYRQAQFDIAVASEIMAVLALTDSLADMKARLGRMVVASDKSGQPVTADDLGVTGALTVLMKDAIKPNLMQTLEGTPVFVHAGPFANIAHGNSSVLADKIALKLVGEEGFVVTEAGFGADIGMEKFFNIKCRASGLVPNVVVLVATVRALKMHGGGPSVTAGVPLKKEYTEENIQLVADGCCNLQKQIQITQLFGVPVVVALNVFKTDTRAEIDLVCELAKRAGAFDAVPCYHWSVGGKGSVDLARAVREAASKRSRFQFLYDVQVPIVDKIRTIAQAVYGAKDIELSPEAQAKIDRYTQQGFGNLPICMAKTHLSLSHQPDKKGVPRDFILPISDVRASIGAGFIYPLVGTMSTMPGLPTRPCFYDIDLDTETEQVKGLF

SEQ ID NO: 1087 - protein, 58 aa, Homo sapiens
VIRGWSFDLLLLIAFHVIMIIYSGSTPVTNNVTEMKQIQRKNIFKSFEKKCYSNLRHV

SEQ ID NO: 1088 - protein, 310 aa, Homo sapiens
LLMHYGISDDSVKTLSIFIFVIECYSESEQEDPEIAAETPPPPHASQTQSLTAQQASSSSPSLSGTSYSFSSLENTVKTPSSFPSSLSKERQSLPDTVNSLSAAEDEGQPITFAVQVHSPVPSEAGIHKALENSFVTSESGFLNSLSSDDTSSLSSNHDHLTVPDKPAGSKIMDKEETKVSEDDEMEKLYKSLEQASLSPLGDRRPSTKKELRKSFVKRCKNPSINEKLHKIRTLNSTLKCKEHDLAMINQLLDDPKLTARKYREWKVMNTLLIQDIYQQQRASPAPDDTDDTPQELKKSPSSPSVENSI

SEQ ID NO: 1089 - protein, 31 aa, Homo sapiens
MRLLNPGIRLLLDLLSLYCMSKATELDQENS

SEQ ID NO: 1090 - protein, 452 aa, Homo sapiens
LRLRTVGCAGRWCAGRWRARGGATSGPARGRPVGCEEELCLACRQRRADGGRRSKMNAGSDPVVIVSAARTIIGSFNGALAAVPVQDLGSTVIKEVLKRATVAPEDVSEVIFGHVLAAGCGQNPVRQASVGAGIPYSVPAWSCQMICGSGLKAVCLAVQSIGIGDSSIVVAGGMENMSKAPHLAYLRTGVKIGEMPLTDSILCDGLTDAFHNCHMGITAENVAKKWQVSREDQDKVAVLSQNRTENAQKAGHFDKEIVPVLVSTRKGLIEVKTDEFPRHGSNIEAMSKLKPYFLTDGTGTVTPANASGINDGAAAVVLMKKSEADKRGLTPLARIVSWSQVGVEPSIMGIGPIPAIKQAVTKAGWSLEDVDIFEINEAFAAVSAAIVKELGLNPEKVNIEGGAIALGHPLGASGCRILVTLLHTLERMGRSRGVAALCIGGGMGIAMCVQRE

SEQ ID NO: 1091 - protein, 192 aa, Homo sapiens
LVFLCLGLIEVKTDEFPRHGSNIEAMSKLKPYFLTDGTGTVTPANASGINDGAAAVVLMKKSEADKRGLTPLARIVSWSQVGVEPSIMGIGPIPAIKQAVTKAGWSLEDVDIFEINEAFAAVSAAIVKELGLNPEKVNIEGGAIALGHPLGASGCRILVTLLHTLERMGRSRGVAALCIGGGMGIAMCVQRE

SEQ ID NO: 1092 - protein, 438 aa, Homo sapiens
LGVQQLRAARGRAWRAAPLQCGDPLARSPAVPAPRVPAQPPPGLGRRASRKEAATLAMASPPACPSEEDESLKGCELYVQLHGIQQVLKDCIVHLCISKPERPMKFLREHFEKLEKEENRQILARQKSNSQSDSHDEEVSPTPPNPVVKARRRRGGVSAEVYTEEDAVSYVRKVIPKDYKTMTALAKAISKNVLFAHLDDNERSDIFDAMFPVTHIAGETVIQQGNEGDNFYVVDQGEVDVYVNGEWVTNISEGGSFGELALIYGTPRAATVKAKTDLKLWGIDRDSYRRILMGSTLRKRKMYEEFLSKVSILESLEKWERLTVADALEPVQFEDGEKIVVQGEPGDDFYIITEGTASVLQRRSPNEEYVEVGRLGPSDYFGEIALLLNRPRAATVVARGPLKCVKLDRPRFERVLGPCSEILKRNIQRYNSFISLTV

SEQ ID NO: 1093 - protein, 394 aa, Homo sapiens
LDPQERKEAATLAMASPPACPSEEDESLKGCELYVQLHGIQQVLKDCIVHLCISKPERPMKFLREHFEKLEKEENRQILARQKSNSQSDSHDEEVSPTPPNPVVKARRRRGGVSAEVYTEEDAVSYVRKVIPKDYKTMTALAKAISKNVLFAHLDDNERSDIFDAMFPVTHIAGETVIQQGNEGDNFYVVDQGEVDVYVNGEWVTNISEGGSFGELALIYGTPRAATVKAKTDLKLWGIDRDSYRRILMGSTLRKRKMYEEFLSKVSILESLEKWERLTVADALEPVQFEDGEKIVVQGEPGDDFYIITEGTASVLQRRSPNEEYVEVGRLGPSDYFGEIALLLNRPRAATVVARGPLKCVKLDRPRFERVLGPCSEILKRNIQRYNSFISLTV

SEQ ID NO: 1094 - protein, 422 aa, Homo sapiens
VACARAAAQLQLSRRTAAKGSSREQRSARRASSRKEAATLAMASPPACPSEEDESLKGCELYVQLHGIQQVLKDCIVHLCISKPERPMKFLREHFEKLEKEENRQILARQKSNSQSDSHDEEVSPTPPNPVVKARRRRGGVSAEVYTEEDAVSYVRKVIPKDYKTMTALAKAISKNVLFAHLDDNERSDIFDAMFPVTHIAGETVIQQGNEGDNFYVVDQGEVDVYVNGEWVTNISEGGSFGELALIYGTPRAATVKAKTDLKLWGIDRDSYRRILMGSTLRKRKMYEEFLSKVSILESLEKWERLTVADALEPVQFEDGEKIVVQGEPGDDFYIITEGTASVLQRRSPNEEYVEVGRLGPSDYFGEIALLLNRPRAATVVARGPLKCVKLDRPRFERVLGPCSEILKRNIQRYNSFISLTV

SEQ ID NO: 1095 - protein, 227 aa, Homo sapiens
VRWRRAARGHLLFFAKSEPERQAAAAAEGSATVSAGARTARAREEPPRARALRATPATSSRELCPGDRARVMTTNPKPNKALKVKKEAGENAPVLSDDELVSMSVRELNQHLRGLTKEEVTRLKQRRRTLKNRGYAASCRIKRVTQKEELERQRVELQQEVEKLARENSSMRLELDALRSKYEALQTFARTVARGPVAPSKVATTSVITIVKSTELSSTSVPFSAAS

SEQ ID NO: 1096 - protein, 275 aa, Homo sapiens
LPAFLGALCCFSCVPLWGLGRPPHPVVLPCVCSSVSSGLWSARTRGRGAPVPAQGLLSAGMDLSANQDEETDQETFQLEIDRDTKKCAFRTHTGKYWTLTATGGVQSTASSKNASCYFDIEWRDRRITLRASNGKFVTSKKNGQLAASVETAGDSELFLMKLINRPIIVFRGEHGFIGCRKVTGTLDANRSSYDVFQLEFNDGAYNIKDSTGKYWTVGSDSAVTSSGDTPVDFFFEFCDYNKVAIKVGGRYLKGDHAGVLKASAETVDPASLWEY

SEQ ID NO: 1097 - protein, 204 aa, Homo sapiens
LPPLLLLLLLPLLLHESPQPPALRVVATSSDRNFMNKHQKPVLTGQRFKTRKRDEKEKFEPTVFRDTLVQGLNEAGDDLEAVAKFLDSTGSRLDYRRYADTLFDILVAGSMLAPGGTRIDDGDKTKMTNHCVFSANEDHETIRNYAQVFNKLIRRYKYLEKAFEDEMKKPFPKQSRQSWRCCRGFCWAMAPCPPPSSPVSSPTA

SEQ ID NO: 1098 - protein, 598 aa, Homo sapiens
VVLIFRFFSLFFFKQPLFTMNKLYIGNLSENAAPSDLESIFKDAKIPVSGPFLVKTGYAFVDCPDESWALKAIEALSGKIELHGKPIEVEHSVPKRQRIRKLQIRNIPPHLQWEVLDSLLVQYGVVESCEQVNTDSETAVVNVTYSSKDQARQALDKLNGFQLENFTLKVAYIPDEMAAQQNPLQQPRGRRGLGQRGSSRQGSPGSVSKQKPCDLPLRLLVPTQFVGAIIGKEGATIRNITKQTQSKIDVHRKENAGAAEKSITILSTPEGTSAACKSILEIMHKEAQDIKFTEEIPLKILAHNNFVGRLIGKEGRNLKKIEQDTDTKITISPLQELTLYNPERTITVKGNVETCAKAEEEIMKKIRESYENDIASMNLQAHLIPGLNLNALGLFPPTSGMPPPTSGPPSAMTPPYPQFEQSETETVHLFIPALSVGAIIGKQGQHIKQLSRFAGASIKIAPAEAPDAKVRMVIITGPPEAQFKAQGRIYGKIKEENFVSPKEEVKLEAHIRVPSFAAGRVIGKGGKTVNELQNLSSAEVVVPRDQTPDENDQVVVKITGHFYACQVAQRKIQEILTQVKQHQQQKALQSGPPQSRRK

SEQ ID NO: 1099 - protein, 54 aa, Homo sapiens
LFMTAYFLVSALAEMPDSAAALLGTCCKLQIIPTLCHLVSNLPGGTLEWIGMGK

SEQ ID NO: 1100 - protein, 141 aa, Homo sapiens
LFFSLVLLFEYILLYKDGVMFQIDQATKQCSKMTLTQPWDPLDIPQNSTFEDQYSIGGPQEQITVQEWSDRKSARSYETWIGIYTVKDCYPVQETFTINYSVILSTRFFDIQLGIKDPSVFTPPSTCQMAQLEKMSEDCSW

SEQ ID NO: 1101 - protein, 344 aa, Homo sapiens
MPPRMLVAPLPLHFLLAAVSSENRSGRRQWQQAVAAGSGPGRNSSRAIHWSLPRALVPATGTRASGSQKRQRPPKGQEALWSRPHSRHSAERAGGSHSDPGRLSAPLGLGLPSGRGRLTAMPGRAPLRTVPGALGAWLLGGLWAWTLCGLCSLGAVGAPRPCQAPQQWEGRQVMYQQSSGRNSRALLSYDGLNQRVRVLDERKALIPCKRLFEYILLYKDGVMFQIDQATKQCSKMTLTQPWDPLDIPQNSTFEDQYSIGGPQEQITVQEWSDRKSARSYETWIGIYTVKDCYPVQETFTINYSVILSTRFFDIQLGIKDPSVFTPPSTCQMAQLEKMSEDCSW

SEQ ID NO: 1102 - protein, 112 aa, Homo sapiens
LSGSGGGGRCCESGGGGAGRQREGARPSGGGVGAENMAGGKAGKDSGKAKAKAVSRSQRAGLQVLELAGNASKDLKVKRITPRHLQLAIRGDEELDSLIKATIAGGEKRRCS

SEQ ID NO: 1103 - protein, 102 aa, Homo sapiens
LSGSGGGGRCCESGGGGAGRQREGARPSGGGVGAENMAGGKAGKDSGKAKAKAVSRSQRAGLQFPVGRIHRHLKTRTTSHGRVGATAAVYSAAILEYLTAEV

SEQ ID NO: 1104 - protein, 158 aa, Homo sapiens
LSGSGGGGRCCESGGGGAGRQREGARPSGGGVGAENMAGGKAGKDSGKAKAKAVSRSQRAGLQFPVGRIHRHLKTRTTSHGRVGATAAVYSAAILEYLTAEVLELAGNASKDLKVKRITPRHLQLAIRGDEELDSLIKATIAGGGMYYYLSLDSYWSF

SEQ ID NO: 1105 - protein, 445 aa, Homo sapiens
VSSTVKMKLANWYWLSSAVLATYGFLVVANNETEEIKDERAKDVCPVRLESRGKCEEAGECPYQVSLPPLTIQLPKQFSRIEEVFKEVQNLKEIVNSLKKSCQDCKLQADDNGDPGRNGLLLPSTGAPGEVGDNRVRELESEVNKLSSELKNAKEEINVLHGRLEKLNLVNMNNIENYVDSKVANLTFVVNSLDGKCSKCPSQEQIQSRPVQHLIYKDCSDYYAIGKRSSETYRVTPDPKNSSFEVYCDMETMGGGWTVLQARLDGSTNFTRTWQDYKAGFGNLRREFWLGNDKIHLLTKSKEMILRIDLEDFNGVELYALYDQFYVANEFLKYRLHVGNYNGTAGDALRFNKHYNHDLKFFTTPDKDNDRYPSGNCGLYYSSGWWFDACLSANLNGKYYHQKYRGVRNGIFWGTWPGVSEAHPGGYKSSFKEAKMMIRPKHFKP

SEQ ID NO: 1106 - protein, 231 aa, Homo sapiens
VSSTVKMKLANWYWLSSAVLATYGFLVVANNETEEIKDERAKDVCPVRLESRGKCEEAGECPYQVSLPPLTIQLPKQFSRIEEVFKEVQNLKEIVNSLKKSCQDCKLQADDNGDPGRNGLLLPSTGAPGEVGDNRVRELESEVNKLSSELKNAKEEINVLHGRLEKLNLVNMNNIENYVDSKVANLTFVVNSLDGKCSKCPSQEQIQSRPGMYNNVFLSYVHKCYTAREYL

SEQ ID NO: 1107 - protein, 97 aa, Homo sapiens
MGRLVAVGLLGIALALLGERLLALRNRLKASREVESVDLPHCHLIKGIEAGSEDIDILPNGLAFFSVRQSLAMLPRLVSNCWPQAVLPRQPPKVLEL

SEQ ID NO: 1108 - protein, 484 aa, Homo sapiens
VGAAVRRQETSAPRCTRPSRRQRGYCQQRRRLPRSAPTAPARPCRAERGSGGGMLALLAASVALAVAAGAQDSPAPGSRFVCTALPPEAVHAGCPLPAMPMQGGAQSPEEELRAAVLQLRETVVQQKETLGAQREAIRELTGKLARCEGLAGGKARGAGATGKDTMGDLPRDPGHVVEQLSRSLQTLKDRLESLEHQLRANVSNAGLPGDFREVLQQRLGELERQLLRKVAELEDEKSLLHNETSAHRQKTESTLNALLQRVTELERGNSAFKSPDAFKVSLPLRTNYLYGKIKKTLPELYAFTICLWLRSSASPGIGTPFSYAVPGQANEIVLIEWGNNPIELLINDKVAQLPLFVSDGKWHHICVTWTTRDGMWEAFQDGEKLGTGENLAPWHPIKPGGVLILGQEQDTVGGRFDATQAFVGELSQFNIWDRVLRAQEIVNIANCSTNMPGNIIPWVDNNVDVFGGASKWPVETCEERLLDL

SEQ ID NO: 1109 - protein, 163 aa, Homo sapiens
LRPPHPRTLKAPPKMMMGCGESELKSADGEEAAAVPGPPPEPQVPQLRAPVPEPGLDLSLSPRPDSPQPRHGSPGRRKGRAERRGAARQRRQVSGGGWPPARDGLAPTWSLPCPLLPGPLPPDAALPGAVRAAACGAAGAGDARAEEQPGLGPGAAGRSREPL

SEQ ID NO: 1110 - protein, 21 aa, Homo sapiens
LEMHRERRNSEEKNFSVNDSF

SEQ ID NO: 1111 - protein, 110 aa, Homo sapiens
LPFPVPPPRAPAARARRRPPPCCPLPLGVCMRPGPAPWPCPCPRAASGPARPPSRVLSPNSQSSPAGDRGPAQEGGWFVRVPLPRGAPAPSSPSGDVPVGNRKKQFQLIV

SEQ ID NO: 1112 - protein, 86 aa, Homo sapiens
LLQGGARQRGPAPWPCPCPRAASGPARPPSRVLSPNSQSSPAGDRGPAQEGGWFVRVPLPRGAPAPSSPSGDVPVGNRKKQFQLIV

SEQ ID NO: 1113 - protein, 388 aa, Homo sapiens
VTPAVSGSLLVMKALRLSASALFCLLLINGLGAAPPGRPEAQPPPLSSEHKEPVAGDAVPGPKDGSAPEVRGARNSEPQDEGELFQGVDPRALAAVLLQALDRPASPPAPSGSQQGPEEEAAEALLTETVRSQTHSLPAPESPEPAAPPRPQTPENGPEASDPSEELEALASLLQELRDFSPSSAKRQQETAAAETETRTHTLTRVNLESPGPERVWRASWGEFQARVPERAPLPPPAPSQFQARMPDSGPLPETHKFGEGVSSPKTHLGEALAPLSKAYQGVAAPFPKARRPESALLGGSEAGERLLQQGLAQVEAGRRQAEATRQAAAQEERLADLASDLLLQFAAGRGPAARPCPLALPLSPGCVGTCQTPLPGPEPELPELTRG

SEQ ID NO: 1114 - protein, 630 aa, Homo sapiens
LLLNVPLLVSGSLLVMKALRLSASALFCLLLINGLGAAPPGRPEAQPPPLSSEHKEPVAGDAVPGPKDGSAPEVRGARNSEPQDEGELFQGVDPRALAAVLLQALDRPASPPAPSGSQQGPEEEAAEALLTETVRSQTHSLPAPESPEPAAPPRPQTPENGPEASDPSEELEALASLLQELRDFSPSSAKRQQETAAAETETRTHTLTRVNLESPGPERVWRASWGEFQARVPERAPLPPPAPSQFQARMPDSGPLPETHKFGEGVSSPKTHLGEALAPLSKAYQGVAAPFPKARRPESALLGGSEAGERLLQQGLAQVEAGRRQAEATRQAAAQEERLADLASDLLLQYLLQGGARQRGLGGRGLQEAAEERESAREEEEAEQERRGGEERVGEEDEEAAEAEAEAEEAERARQNALLFAEEEDGEAGAEDKRSQEETPGHRRKEAEGTEEGGEEEDDEEMDPQTIDSLIELSTKLHLPADDVVSIIEEVEEKRKRKKNAPPEPVPPPRAAPAPTHVRSPQPPPPAPAPARDELPDWNEVLPPWDREEDEVYPPGPYHPFPNYIRPRTLQPPSALRRRHYHHALPPSRHYPGREAQARRAQEEAEAEERRLQEQEELENYIEHVLLRRP

SEQ ID NO: 1115 - protein, 145 aa, Homo sapiens
LRKCRYSVGLVLSPFPPVALKSGYSPVWPPALGEPGWGVTRRPLGAEEAPVRRLRAPDKSGAGESSAVSMEEQETEEVGGRSSRKNAATVNAASLPPCFGVKSCRCRRCSCRRCLLYFSWPRGRISPPVGQCAGRGVGIPLYGGD

SEQ ID NO: 1116 - protein, 1021 aa, Homo sapiens
MATEGAAQLGNRVAGMVCSLWVLLLVSSVLALEEVLLDTTGETSEIGWLTYPPGGWDEVSVLDDQRRLTRTFEACHVAGAPPGTGQDNWLQTHFVERRGAQRAHIRLHFSVRACSSLGVSGGTCRETFTLYYRQAEEPDSPDSVSSWHLKRWTKVDTIAADESFPSSSSSSSSSSSAAWAVGPHGAGQRAGLQLNVKERSFGPLTQRGFYVAFQDTGACLALVAVRLFSYTCPAVLRSFASFPETQASGAGGASLVAAVGTCVAHAEPEEDGVGGQAGGSPPRLHCNGEGKWMVAVGGCRCQPGYQPARGDKACQACPRGLYKASAGNAPCSPCPARSHAPNPAAPVCPCLEGFYRASSDPPEAPCTGPPSAPQELWFEVQGSALMLHWRLPRELGGRGDLLFNVVCKECEGRQEPASGGGGTCHRCRDEVHFDPRQRGLTESRVLVGGLRAHVPYILEVQAVNGVSELSPDPPQAAAINVSTSHEVPSAVPVVHQVSRASNSITVSWPQPDQTNGNILDYQLRYYDQAEDESHSFTLTSETNTATVTQLSPGHIYGFQVRARTAAGHGPYGGKVYFQTLPQGELSSQLPERLSLVIGSILGALAFLLLAAITVLAVVFQRKRRGTGYTEQLQQYSSPGLGVKYYIDPSTYEDPCQAIRELAREVDPAYIKIEEVIGTGSFGEVRQGRLQPRGRREQTVAIQALWAGGAESLQMTFLGRAAVLGQFQHPNILRLEGVVTKSRPLMVLTEFMELGPLDSFLRQREGQFSSLQLVAMQRGVAAAMQYLSSFAFVHRSLSAHSVLVNSHLVCKVARLGHSPQGPSCLLRWAAPEVIAHGKHTTSSDVWSFGILMWEVMSYGERPYWDMSEQEVLNAIEQEFRLPPPPGCPPGLHLLMLDTWQKDRARRPHFDQLVAAFDKMIRKPDTLQAGGDPGERPSQALLTPVALDFPCLDSPQAWLSAIGLECYQDNFSKFGLCTFSDVAQLSLEDLPALGITLAGHQKKLLHHIQLLQQHLRQQGSVEV

SEQ ID NO: 1117 - protein, 687 aa, Homo sapiens
LSRAGAAGAAVSGVGASGPRRSLRPEAGSGPLPGGVSCLVRPSPLSPPPLRAAPCMVWAPLSPRPLSSPSLLLPCVPPRPAGGCSGPGRRVCGPGAEAATRDAARTLRPAQPGPAMAAPRPSPAISVSVSAPAFYAPQKKFGPVVAPKPKVNPFRPGDSEPPPAPGAQRAQMGRVGEIPPPPPEDFPLPPPPLAGDGDDAEGALGGAFPPPPPPIEESFPPAPLEEEIFPSPPPPPEEEGGPEAPIPPPPQPREKVSSIDLEIDSLSSLLDDMTKNDPFKARVSSGYVPPPVATPFSSKSSTKPAAGGTAPLPPWKSPSSSQPLPQVPAPAQSQTQFHVQPQPQPKPQVQLHVQSQTQPVSLANTQPRGPPASSPAPAPKFSPVTPKFTPVASKFSPGAPGGSGSQPNQKLGHPEALSAGTGSPQPPSFTYAQQREKPRVQEKQHPVPPPAQNQNQVRSPGAPGPLTLKEVEELEQLTQQLMQDMEHPQRQNVAVNELCGRCHQPLARAQPAVRALGQLFHIACFTCHQCAQQLQGQQFYSLEGAPYCEGCYTDTLEKCNTCGEPITDRMLRATGKAYHPHCFTCVVCARPLEGTSFIVDQANRPHCVPDYHKQYAPRCSVCSEPIMPEPGRDETVRVVALDKNFHMKCYKCEDCGKPLSIEADDNGCFPLDGHVLCRKCHTARAQT

SEQ ID NO: 1118 - protein, 474 aa, Homo sapiens
MERRWPLGLGLVLLLCAPLPPGARAKEVTLMDTSKAQGELGWLLDPPKDGWSEQQQILNGTPLYMYQDCPMQGRRDTDHWLRSNWIYRGEEASRVHVELQFTVRDCKSFPGGAGPLGCKETFNLLYMESDQDVGIQLRRPLFQKVTTVAADQSFTIRDLVSGSVKLNVERCSLGRLTRRGLYLAFHNPGACVALVSVRVFYQRCPETLNGLAQFPDTLPGPAGLVEVAGTCLPHARASPRPSGAPRMHCSPDGEWLVPVGRCHCEPGYEEGGSGEACVACPSGSYRMDMDTPHCLTCPQQSTAESEGATICTCESGHYRAPGEGPQVACTGPPSAPRNLSFSASGTQLSLRWEPPADTGGRQDVRYSVRCSQCQGTAQDGGPCQPCGVGVHFSPGARGLTTPAVHVNGLEPYANYTFNVEAQNGVSGLGSSGHASTSVSISMGHAGERLRGAGTGTWWRQKGLRPQNKLMGRKP

SEQ ID NO: 1119 - protein, 1007 aa, Homo sapiens
LSAAGQAAGMGPPLPLLLLLLLLLPPRVLPAAPSSVPRGRQLPGRLDGVFGRCQKVPAMDFYRYEVSPVALQRLRVALQKLSGTGFTWQDDYTQYVMDQELADLPKTYLRRPEASSPARPSKHSVGSERRYSREGGAALANALRRHLPFLEALSQAPASDVLARTHTAQDRPPAEGDDRFSESILTYVAHTSALTYPPGSRTQLREDLLPRTLGQLQPDELSPKVDSGVDRHHLMAALSAYAAQRPPAPPGEGSLEPQYLLRAPSRMPRPLLAPAAPQKWPSPLGDSEDPSSTGDGARIHTLLKDLQRQPAEVRGLSGLELDGMAELMAGLMQGVDHGVARGSPGRAALGESGEQADGPKATLRGDSFPDDGVQDDDDRLYQEVHRLSATLGGLLQDHGSRLLPGALPFARPLDMERKKSEHPESSLSSEEETAGVENVKSQTYSKDLLGQQPHSEPGAAAFGELQNQMPGPSKEEQSLPAGAQEALSDGLQLEVQPSEEEARGYIVTDRDPLRPEEGRRLVEDVARLLQVPSSAFADVEVLGPAVTFKVSANVQNVTTEDVEKATVDNKDKLEETSGLKILQTGVGSKSKLKFLPPQAEQEDSTKFIALTLVSLACILGVLLASGLIYCLRHSSQHRLKEKLSGLGGDPGADATAAYQELCRQRMATRPPDRPEGPHTSRISSVSSQFSDGPIPSPSARSSASSWSEEPVQSNMDISTGHMILSYMEDHLKNKNRLEKEWEALCAYQAEPNSSFVAQREENVPKNRSLAVLTYDHSRVLLKAENSHSHSDYINASPIMDHDPRNPAYIATQGPLPATVADFWQMVWESGCVVIVMLTPLAENGVRQCYHYWPDEGSNLYHIYEVNLVSEHIWCEDFLVRSFYLKNLQTNETRTVTQFHFLSWYDRGVPSSSRSLLDFRRKVNKCYRGRSCPIIVHCSDGAGRSGTYVLIDMVLNKMAKGAKEIDIAATLEHLRDQRPGMVQTKEQFEFALTAVAEEVNAILKALPQ

SEQ ID NO: 1120 - protein, 322 aa, Homo sapiens
VLFLLLIYLLVFGQFCSEGKVYLSMLEDTGFWLESKILSFIQDQEEDYLKLHRVIYQQIIQTYLTVCKDVVMVGLGDHQFQMQLLQRSLGIMQTVKGFFYVSLLLDILKEITGSSLIQKTDSDEEVAMLLDTVQKVFQKMLECIARSFRKQPEEGLRLLYSVQRPLHEFITAVQSRHTDTPVHRGVLSTLIAGPVVEISHQLRKVSDVEELTPPEHLSDLPPFSRCLIGIIIKSSNVVRSFLDELKACVASNDIEGIVCLTAAVHIILVINAGKHKSSKVREVAATVHRKLKTFMEITLEEDSIERFLYESSSRTLGELLNS

SEQ ID NO: 1121 - protein, 894 aa, Homo sapiens
VMTPPSRAEAGVRRSRVPSEGRWRGAEPPGISASTQPASAGRAARHCGAMSGARGEGPEAGAGGAGGRAAPENPGGVLSVELPGLLAQLARSFALLLPVYALGYLGLSFSWVLLALALLAWCRRSRGLKALRLCRALALLEDEERVVRLGVRACDLPAWVHFPDTERAEWLNKTVKHMWPFICQFIEKLFRETIEPAVRGANTHLSTFSFTKVDVGQQPLRINGVKVYTENVDKRQIILDLQISFVGNCEIDLEIKRYFCRAGVKSIQIHGTMRVILEPLIGDMPLVGALSIFFLRKPLLEINWTGLTNLLDVPGLNGLSDTIILDIISNYLVLPNRITVPLVSEVQIAQLRFPVPKGVLRIHFIEAQDLQGKDTYLKGLVKGKSDPYGIIRVGNQIFQSRVIKENLSPKWNEVYEALVYEHPGQELEIELFDEDPDKDDFLGSLMIDLIEVEKERLLDEWFTLDEVPKGKLHLRLEWLTLMPNASNLDKVLTDIKADKDQANDGLSSALLILYLDSARNLPSGKKISSNPNPVVQMSVGHKAQESKIRYKTNEPVWEENFTFFIHNPKRQDLEVEVRDEQHQCSLGNLKVPLSQLLTSEDMTVSQRFQLSNSGPNSTIKMKIALRVLHLEKRERPPDHQHSAQVKRPSVSKEGRKTSIKSHMSGSPGPGGSNTAPSTPVIGGSDKPGMEEKAQPPEAGPQGLHDLGRSSSSLLASPGHISVKEPTPSIASDISLPIATQELRQRLRQLENGTTLGQSPLGQIQLTIRHSSQRNKLIVVVHACRNLIAFSEDGSDPYVRMYLLPDKRRSGRRKTHVSKKTLNPVFDQSFDFSVSLPEVQRRTLDVAVKNSGGFLSKDKGLLGKVLVALASEELAKGWTQWYDLTEDGTRPQAMT

SEQ ID NO: 1122 - protein, 72 aa, Homo sapiens
LGPSPAPQKREDPLSWPIPSLLPSPLPPNFPSRMLFPCTTDRLSDAACLEAALGASGGGGGGGGGGGSSGVL

SEQ ID NO: 1123 - protein, 59 aa, Homo sapiens
LVWSVFWIFTILIEIHGSIRVVRAPLAPLCGYSPVPFSEATGQKPLYNALPNSRILKET

SEQ ID NO: 1124 - protein, 121 aa, Homo sapiens
LSVIRDIGAIAQVHAENGDIIAEEQQRILDLGITGPEGHVLSRPEEVEAEAVNRAITIANQTNCPLYITKVMSKSSAEVIAQARKKESAVKMVAVTDSFFQAVTQGSRLSLEDIWGVMYLP

SEQ ID NO: 1125 - protein, 484 aa, Homo sapiens
LLQAAGGRDASRLSSCSHDGLLFSAEACKDSRIGGMMKTLLLFVGLLLTWESGQVLGDQTVSDNELQEMSNQGSKYVNKEIQNAVNGVKQIKTLIEKTNEERKTLLSNLEEAKKKKEDALNETRESETKLKELPGVCNETMMALWEECKPCLKQTCMKFYARVCRSGSGLVGRQLEEFLNQSSPFYFWMNGDRIDSLLENDRQQTHMLDVMQDHFSRASSIIDELFQDRFFTREPQDTYHYLPFSLPHRRPHFFFPKSRIVRSLMPFSPYEPLNFHAMFQPFLEMIHEAQQAMDIHFHSPAFQHPPTEFIREGDDDRTVCREIRHNSTGCLRMKDQCDKCREILSVDCSTNNPSQAKLRRELDESLQVAERLTRKYNELLKSYQWKMLNTSSLLEQLNEQFNWVSRLANLTQGEDQYYLRVTTVASHTSDSDVPSGVTEVVVKLFDSDPITVTVPVEVSRKNPKFMETVAEKALQEYRKKHREE

SEQ ID NO: 1126 - protein, 501 aa, Homo sapiens
MQVCSQPQRGCVREQSAINTAPPSAHNAASPGGARGHRVPLTEACKDSRIGGMMKTLLLFVGLLLTWESGQVLGDQTVSDNELQEMSNQGSKYVNKEIQNAVNGVKQIKTLIEKTNEERKTLLSNLEEAKKKKEDALNETRESETKLKELPGVCNETMMALWEECKPCLKQTCMKFYARVCRSGSGLVGRQLEEFLNQSSPFYFWMNGDRIDSLLENDRQQTHMLDVMQDHFSRASSIIDELFQDRFFTREPQDTYHYLPFSLPHRRPHFFFPKSRIVRSLMPFSPYEPLNFHAMFQPFLEMIHEAQQAMDIHFHSPAFQHPPTEFIREGDDDRTVCREIRHNSTGCLRMKDQCDKCREILSVDCSTNNPSQAKLRRELDESLQVAERLTRKYNELLKSYQWKMLNTSSLLEQLNEQFNWVSRLANLTQGEDQYYLRVTTVASHTSDSDVPSGVTEVVVKLFDSDPITVTVPVEVSRKNPKFMETVAEKALQEYRKKHREE

SEQ ID NO: 1127 - protein, 428 aa, Homo sapiens
VPLTEACKDSRIGGMMKTLLLFVGLLLTWESGQVLGDQTVSDNELQEMSNQGSKYVNKEIQNAVNGVKQIKTLIEKTNEERKTLLSNLEEAKKKKEDALNETRESETKLKELPGVCNETMMALWEECKPCLKQTCMKFYARVCRSGSGLVGRQLEEFLNQSSPFYFWMNGDRIDSLLENDRQQTHMLDVMQDHFSRASSIIDELFQDRFFTREPQDTYHYLPFSLPHRRPHFFFPKSRIVRSLMPFSPYEPLNFHAMFQPFLEMIHEAQQAMDIHFHSPAFQHPPTEFIREGDDDRTVCREIRHNSTGCLRMKDQCDKCREILSVDCSTNNPSQAKLRRELDESLQVAERLTRKYNELLKSYQWKMLNTSSLLEQLNEQFNWVSRLANLTQGEDQYYLRVTTVSCVPATCCGSGARAVIGSRGMCAFD

SEQ ID NO: 1128 - protein, 127 aa, Homo sapiens
VPLTEACKDSRIGGMMKTLLLFVGLLLTWESGQVLGDQTVSDNELQEMSNQGSKYVNKEIQNAVNGVKQIKTLIEKTNEERKTLLSNLEEAKKKKEVRRSRYRLPALTIPLEGREGVTARCPAGLPW

SEQ ID NO: 1129 - protein, 55 aa, Homo sapiens
LKLGGGGCSEPRLRHCTPAWATEKTKRKTNDEGLQKLKPRHVSAPSMWAWFCQCF

SEQ ID NO: 1130 - protein, 734 aa, Homo sapiens
LKGEEEEGTWGHGACSAKCQALLTGVGQMGKTPPGPGLGPAPEPDQLLLSTLPVSLGFPRAAVAPYWTSPEKMEKKLHAVPAAKTVKFKCPSSGTPNPTLRWLKNGKEFKPDHRIGGYKVRYATWSIIMDSVVPSDKGNYTCIVENEYGSINHTYQLDVVERSPHRPILQAGLPANKTVALGSNVEFMCKVYSDPQPHIQWLKHIEVNGSKIGPDNLPYVQILKTAGVNTTDKEMEVLHLRNVSFEDAGEYTCLAGNSIGLSHHSAWLTVLEALEERPAVMTSPLYLEIIIYCTGAFLISCMVGSVIVYKMKSGTKKSDFHSQMAVHKLAKSIPLRRQVTVSADSSASMNSGVLLVRPSRLSSSGTPMLAGVSEYELPEDPRWELPRDRLVLGKPLGEGCFGQVVLAEAIGLDKDKPNRVTKVAVKMLKSDATEKDLSDLISEMEMMKMIGKHKNIINLLGACTQDGPLYVIVEYASKGNLREYLQARRPPGLEYCYNPSHNPEEQLSSKDLVSCAYQVARGMEYLASKKCIHRDLAARNVLVTEDNVMKIADFGLARDIHHIDYYKKTTNGRLPVKWMAPEALFDRIYTHQSDVWSFGVLLWEIFTLGGSPYPGVPVEELFKLLKEGHRMDKPSNCTNELYMMMRDCWHAVPSQRPTFKQLVEDLDRIVALTSNQEYLDLSMPLDQYSPSFPDTRSSTCSSGEDSVFSHEPLPEEPCLPRHPAQLANGGLKRR

SEQ ID NO: 1131 - protein, 947 aa, Homo sapiens
LRSGGGGHKVWRPRVADGSPPPAPPPGHQLRLHCSRPGWRRRAPSAAGSRAPAAELLRPRQDPNRARGRRAGAGDAGTRPLAQATADSPEAEPPRRARVSLKRRIELTVEYPWRCGALSPTSNCRTGMWSWKCLLFWAVLVTATLCTARPSPTLPEQAQPWGAPVEVESFLVHPGDLLQLRCRLRDDVQSINWLRDGVQLAESNRTRITGEEVEVQDSVPADSGLYACVTSSPSGSDTTYFSVNVSDALPSSEDDDDDDDSSSEEKETDNTKPNPVAPYWTSPEKMEKKLHAVPAAKTVKFKCPSSGTPNPTLRWLKNGKEFKPDHRIGGYKVRYATWSIIMDSVVPSDKGNYTCIVENEYGSINHTYQLDVVERSPHRPILQAGLPANKTVALGSNVEFMCKVYSDPQPHIQWLKHIEVNGSKIGPDNLPYVQILKTAGVNTTDKEMEVLHLRNVSFEDAGEYTCLAGNSIGLSHHSAWLTVLEALEERPAVMTSPLYLEIIIYCTGAFLISCMVGSVIVYKMKSGTKKSDFHSQMAVHKLAKSIPLRRQVTVSADSSASMNSGVLLVRPSRLSSSGTPMLAGVSEYELPEDPRWELPRDRLVLGKPLGEGCFGQVVLAEAIGLDKDKPNRVTKVAVKMLKSDATEKDLSDLISEMEMMKMIGKHKNIINLLGACTQDGPLYVIVEYASKGNLREYLQARRPPGLEYCYNPSHNPEEQLSSKDLVSCAYQVARGMEYLASKKCIHRDLAARNVLVTEDNVMKIADFGLARDIHHIDYYKKTTNGRLPVKWMAPEALFDRIYTHQSDVWSFGVLLWEIFTLGGSPYPGVPVEELFKLLKEGHRMDKPSNCTNELYMMMRDCWHAVPSQRPTFKQLVEDLDRIVALTSNQEYLDLSMPLDQYSPSFPDTRSSTCSSGEDSVFSHEPLPEEPCLPRHPAQLANGGLKRR

SEQ ID NO: 1132 - protein, 949 aa, Homo sapiens
LRSGGGGHKVWRPRVADGSPPPAPPPGHQLRLHCSRPGWRRRAPSAAGSRAPAAELLRPRQDPNRARGRRAGAGDAGTRPLAQATADSPEAEPPRRARVSLKRRIELTVEYPWRCGALSPTSNCRTGMWSWKCLLFWAVLVTATLCTARPSPTLPEQAQPWGAPVEVESFLVHPGDLLQLRCRLRDDVQSINWLRDGVQLAESNRTRITGEEVEVQDSVPADSGLYACVTSSPSGSDTTYFSVNVSDALPSSEDDDDDDDSSSEEKETDNTKPNRMPVAPYWTSPEKMEKKLHAVPAAKTVKFKCPSSGTPNPTLRWLKNGKEFKPDHRIGGYKVRYATWSIIMDSVVPSDKGNYTCIVENEYGSINHTYQLDVVERSPHRPILQAGLPANKTVALGSNVEFMCKVYSDPQPHIQWLKHIEVNGSKIGPDNLPYVQILKTAGVNTTDKEMEVLHLRNVSFEDAGEYTCLAGNSIGLSHHSAWLTVLEALEERPAVMTSPLYLEIIIYCTGAFLISCMVGSVIVYKMKSGTKKSDFHSQMAVHKLAKSIPLRRQVTVSADSSASMNSGVLLVRPSRLSSSGTPMLAGVSEYELPEDPRWELPRDRLVLGKPLGEGCFGQVVLAEAIGLDKDKPNRVTKVAVKMLKSDATEKDLSDLISEMEMMKMIGKHKNIINLLGACTQDGPLYVIVEYASKGNLREYLQARRPPGLEYCYNPSHNPEEQLSSKDLVSCAYQVARGMEYLASKKCIHRDLAARNVLVTEDNVMKIADFGLARDIHHIDYYKKTTNGRLPVKWMAPEALFDRIYTHQSDVWSFGVLLWEIFTLGGSPYPGVPVEELFKLLKEGHRMDKPSNCTNELYMMMRDCWHAVPSQRPTFKQLVEDLDRIVALTSNQEYLDLSMPLDQYSPSFPDTRSSTCSSGEDSVFSHEPLPEEPCLPRHPAQLANGGLKRR

SEQ ID NO: 1133 - protein, 947 aa, Homo sapiens
LRSGGGGHKVWRPRVADGSPPPAPPPGHQLRLHCSRPGWRRRAPSAAGSRAPAAELLRPRQDPNRARGRRAGAGDAGTRPLAQATADSPEAEPPRRARVSLKRRIELTVEYPWRCGALSPTSNCRTGMWSWKCLLFWAVLVTATLCTARPSPTLPEQAQPWGAPVEVESFLVHPGDLLQLRCRLRDDVQSINWLRDGVQLAESNRTRITGEEVEVQDSVPADSGLYACVTSSPSGSDTTYFSVNVSDALPSSEDDDDDDDSSSEEKETDNTKPNRMPVAPYWTSPEKMEKKLHAVPAAKTVKFKCPSSGTPNPTLRWLKNGKEFKPDHRIGGYKVRYATWSIIMDSVVPSDKGNYTCIVENEYGSINHTYQLDVVERSPHRPILQAGLPANKTVALGSNVEFMCKVYSDPQPHIQWLKHIEVNGSKIGPDNLPYVQILKTAGVNTTDKEMEVLHLRNVSFEDAGEYTCLAGNSIGLSHHSAWLTVLEALEERPAVMTSPLYLEIIIYCTGAFLISCMVGSVIVYKMKSGTKKSDFHSQMAVHKLAKSIPLRRQVSADSSASMNSGVLLVRPSRLSSSGTPMLAGVSEYELPEDPRWELPRDRLVLGKPLGEGCFGQVVLAEAIGLDKDKPNRVTKVAVKMLKSDATEKDLSDLISEMEMMKMIGKHKNIINLLGACTQDGPLYVIVEYASKGNLREYLQARRPPGLEYCYNPSHNPEEQLSSKDLVSCAYQVARGMEYLASKKCIHRDLAARNVLVTEDNVMKIADFGLARDIHHIDYYKKTTNGRLPVKWMAPEALFDRIYTHQSDVWSFGVLLWEIFTLGGSPYPGVPVEELFKLLKEGHRMDKPSNCTNELYMMMRDCWHAVPSQRPTFKQLVEDLDRIVALTSNQEYLDLSMPLDQYSPSFPDTRSSTCSSGEDSVFSHEPLPEEPCLPRHPAQLANGGLKRR

SEQ ID NO: 1134 - protein, 860 aa, Homo sapiens
LRSGGGGHKVWRPRVADGSPPPAPPPGHQLRLHCSRPGWRRRAPSAAGSRAPAAELLRPRQDPNRARGRRAGAGDAGTRPLAQATADSPEAEPPRRARVSLKRRIELTVEYPWRCGALSPTSNCRTGMWSWKCLLFWAVLVTATLCTARPSPTLPEQDALPSSEDDDDDDDSSSEEKETDNTKPNRMPVAPYWTSPEKMEKKLHAVPAAKTVKFKCPSSGTPNPTLRWLKNGKEFKPDHRIGGYKVRYATWSIIMDSVVPSDKGNYTCIVENEYGSINHTYQLDVVERSPHRPILQAGLPANKTVALGSNVEFMCKVYSDPQPHIQWLKHIEVNGSKIGPDNLPYVQILKTAGVNTTDKEMEVLHLRNVSFEDAGEYTCLAGNSIGLSHHSAWLTVLEALEERPAVMTSPLYLEIIIYCTGAFLISCMVGSVIVYKMKSGTKKSDFHSQMAVHKLAKSIPLRRQVTVSADSSASMNSGVLLVRPSRLSSSGTPMLAGVSEYELPEDPRWELPRDRLVLGKPLGEGCFGQVVLAEAIGLDKDKPNRVTKVAVKMLKSDATEKDLSDLISEMEMMKMIGKHKNIINLLGACTQDGPLYVIVEYASKGNLREYLQARRPPGLEYCYNPSHNPEEQLSSKDLVSCAYQVARGMEYLASKKCIHRDLAARNVLVTEDNVMKIADFGLARDIHHIDYYKKTTNGRLPVKWMAPEALFDRIYTHQSDVWSFGVLLWEIFTLGGSPYPGVPVEELFKLLKEGHRMDKPSNCTNELYMMMRDCWHAVPSQRPTFKQLVEDLDRIVALTSNQEYLDLSMPLDQYSPSFPDTRSSTCSSGEDSVFSHEPLPEEPCLPRHPAQLANGGLKRR

SEQ ID NO: 1135 - protein, 858 aa, Homo sapiens
LRSGGGGHKVWRPRVADGSPPPAPPPGHQLRLHCSRPGWRRRAPSAAGSRAPAAELLRPRQDPNRARGRRAGAGDAGTRPLAQATADSPEAEPPRRARVSLKRRIELTVEYPWRCGALSPTSNCRTGMWSWKCLLFWAVLVTATLCTARPSPTLPEQDALPSSEDDDDDDDSSSEEKETDNTKPNPVAPYWTSPEKMEKKLHAVPAAKTVKFKCPSSGTPNPTLRWLKNGKEFKPDHRIGGYKVRYATWSIIMDSVVPSDKGNYTCIVENEYGSINHTYQLDVVERSPHRPILQAGLPANKTVALGSNVEFMCKVYSDPQPHIQWLKHIEVNGSKIGPDNLPYVQILKTAGVNTTDKEMEVLHLRNVSFEDAGEYTCLAGNSIGLSHHSAWLTVLEALEERPAVMTSPLYLEIIIYCTGAFLISCMVGSVIVYKMKSGTKKSDFHSQMAVHKLAKSIPLRRQVTVSADSSASMNSGVLLVRPSRLSSSGTPMLAGVSEYELPEDPRWELPRDRLVLGKPLGEGCFGQVVLAEAIGLDKDKPNRVTKVAVKMLKSDATEKDLSDLISEMEMMKMIGKHKNIINLLGACTQDGPLYVIVEYASKGNLREYLQARRPPGLEYCYNPSHNPEEQLSSKDLVSCAYQVARGMEYLASKKCIHRDLAARNVLVTEDNVMKIADFGLARDIHHIDYYKKTTNGRLPVKWMAPEALFDRIYTHQSDVWSFGVLLWEIFTLGGSPYPGVPVEELFKLLKEGHRMDKPSNCTNELYMMMRDCWHAVPSQRPTFKQLVEDLDRIVALTSNQEYLDLSMPLDQYSPSFPDTRSSTCSSGEDSVFSHEPLPEEPCLPRHPAQLANGGLKRR

SEQ ID NO: 1136 - protein, 355 aa, Homo sapiens
LRSGGGGHKVWRPRVADGSPPPAPPPGHQLRLHCSRPGWRRRAPSAAGSRAPAAELLRPRQDPNRARGRRAGAGDAGTRPLAQATADSPEAEPPRRARVSLKRRIELTVEYPWRCGALSPTSNCRTGMWSWKCLLFWAVLVTATLCTARPSPTLPEQDALPSSEDDDDDDDSSSEEKETDNTKPNPVAPYWTSPEKMEKKLHAVPAAKTVKFKCPSSGTPNPTLRWLKNGKEFKPDHRIGGYKVRYATWSIIMDSVVPSDKGNYTCIVENEYGSINHTYQLDVVERSPHRPILQAGLPANKTVALGSNVEFMCKVYSDPQPHIQWLKHIEVNGSKIGPDNLPYVQILKPWKRGRQ

SEQ ID NO: 1137 - protein, 494 aa, Homo sapiens
LRSGGGGHKVWRPRVADGSPPPAPPPGHQLRLHCSRPGWRRRAPSAAGSRAPAAELLRPRQDPNRARGRRAGAGDAGTRPLAQATADSPEAEPPRRARVSLKRRIELTVEYPWRCGALSPTSNCRTGMWSWKCLLFWAVLVTATLCTARPSPTLPEQAQPWGAPVEVESFLVHPGDLLQLRCRLRDDVQSINWLRDGVQLAESNRTRITGEEVEVQDSVPADSGLYACVTSSPSGSDTTYFSVNVSVPIDALPSSEDDDDDDDSSSEEKETDNTKPNPVAPYWTSPEKMEKKLHAVPAAKTVKFKCPSSGTPNPTLRWLKNGKEFKPDHRIGGYKVRYATWSIIMDSVVPSDKGNYTCIVENEYGSINHTYQLDVVERSPHRPILQAGLPANKTVALGSNVEFMCKVYSDPQPHIQWLKHIEVNGSKIGPDNLPYVQILKHSGINSSDAEVLTLFNVTEAQSGEYVCKVSNYIGEANQSAWLTVTRPVAKDCWS

SEQ ID NO: 1138 - protein, 429 aa, Homo sapiens
LRSGGGGHKVWRPRVADGSPPPAPPPGHQLRLHCSRPGWRRRAPSAAGSRAPAAELLRPRQDPNRARGRRAGAGDAGTRPLAQATADSPEAEPPRRARVSLKRRIELTVEYPWRCGALSPTSNCRTGMWSWKCLLFWAVLVTATLCTARPSPTLPEQDALPSSEDDDDDDDSSSEEKETDNTKPNRMPVAPYWTSPEKMEKKLHAVPAAKTVKFKCPSSGTPNPTLRWLKNGKEFKPDHRIGGYKVRYATWSIIMDSVVPSDKGNYTCIVENEYGSINHTYQLDVVERSPHRPILQAGLPANKTVALGSNVEFMCKVYSDPQPHIQWLKHIEVNGSKIGPDNLPYVQILKVIMAPVFVGQSTGKETTVSGAQVPVGRLSCPRMGSFLTLQAHTLHLSRDLATSPRTSNRGHKVEVSWEQRAAGMGGAGL

SEQ ID NO: 1139 - protein, 427 aa, Homo sapiens
LRSGGGGHKVWRPRVADGSPPPAPPPGHQLRLHCSRPGWRRRAPSAAGSRAPAAELLRPRQDPNRARGRRAGAGDAGTRPLAQATADSPEAEPPRRARVSLKRRIELTVEYPWRCGALSPTSNCRTGMWSWKCLLFWAVLVTATLCTARPSPTLPEQDALPSSEDDDDDDDSSSEEKETDNTKPNPVAPYWTSPEKMEKKLHAVPAAKTVKFKCPSSGTPNPTLRWLKNGKEFKPDHRIGGYKVRYATWSIIMDSVVPSDKGNYTCIVENEYGSINHTYQLDVVERSPHRPILQAGLPANKTVALGSNVEFMCKVYSDPQPHIQWLKHIEVNGSKIGPDNLPYVQILKVIMAPVFVGQSTGKETTVSGAQVPVGRLSCPRMGSFLTLQAHTLHLSRDLATSPRTSNRGHKVEVSWEQRAAGMGGAGL

SEQ ID NO: 1140 - protein, 169 aa, Homo sapiens
LSPTSNCRTGMWSWKCLLFWAVLVTATLCTARPSPTLPEQDALPSSEDDDDDDDSSSEEKETDNTKPNRMPVAPYWTSPEKMEKKLHAVPAAKTVKFKCPSSGTPNPTLRWLKNGKEFKPDHRIGGYKSGPLTGPSCKQGCPPTKQWPWVATWSSCVRCTVTRSRTSSG

SEQ ID NO: 1141 - protein, 117 aa, Homo sapiens
LSLPSSPLPVFLSRPLASLPGPVVAAAQPWGAPVEVESFLVHPGDLLQLRCRLRDDVQSINWLRDGVQLAESNRTRITGEEVEVQDSVPADSGLYACVTSSPSGSDTTYFSVNVSGW

SEQ ID NO: 1142 - protein, 102 aa, Homo sapiens
VDSESASVVGKRPPFHGTPSTMSSPASTPSRRGSRRGRATPAQTPRSEDARSSPSQRRRGEDSTSTGELQPMPTSPGVDLQSPAAQDVLFSSPPQMHSSVHH

SEQ ID NO: 1143 - protein, 884 aa, Homo sapiens
VDSESASVVGKRPPFHGTPSTMSSPASTPSRRGSRRGRATPAQTPRSEDARSSPSQRRRGEDSTSTGELQPMPTSPGVDLQSPAAQDVLFSSPPQMHSSAIPLDFDVSSPLTYGTPSSRVEGTPRSGVRGTPVRQRPDLGSAQKGLQVDLQSDGAAAEDIVASEQSLGQKLVIWGTDVNVAACKENFQRFLQRFIDPLAKEEENVGIDITEPLYMQRLGEINVIGEPFLNVNCEHIKSFDKNLYRQLISYPQEVIPTFDMAVNEIFFDRYPDSILEHQIQVRPFNALKTKNMRNLNPEDIDQLITISGMVIRTSQLIPEMQEAFFQCQVCAHTTRVEMDRGRIAEPSVCGRCHTTHSMALIHNRSLFSDKQMIKLQESPEDMPAGQTPHTVILFAHNDLVDKVQPGDRVNVTGIYRAVPIRVNPRVSNVKSVYKTHIDVIHYRKTDAKRLHGLDEEAEQKLFSEKRVELLKELSRKPDIYERLASALAPSIYEHEDIKKGILLQLFGGTRKDFSHTGRGKFRAEINILLCGDPGTSKSQLLQYVYNLVPRGQYTSGKGSSAVGLTAYVMKDPETRQLVLQTGALVLSDNGICCIDEFDKMNESTRSVLHEVMEQQTLSIAKAGIICQLNARTSVLAAANPIESQWNPKKTTIENIQLPHTLLSRFDLIFLLLDPQDEAYDRRLAHHLVALYYQSEEQAEEELLDMAVLKDYIAYAHSTIMPRLSEEASQALIEAYVDMRKIGSSRGMVSAYPRQLESLIRLAEAHAKVRLSNKVEAIDVEEAKRLHREALKQSATDPRTGIVDISILTTGMSATSRKRKEELAEALKKLILSKGKTPALKYQQLFEDIRGQSDIAITKDMFEEALRALADDDFLTVTGKTVRLL

SEQ ID NO: 1144 - protein, 114 aa, Homo sapiens
LVRTLLLLTHRCSLSPRNKSVRKPARNSHVCADLIRGAKEKNLKVKGPVRMPTKTLRITTRKTPCGEGSKTWDRFQMRIHKRLIDLHSPSEIVKQITSISIEPGVEVEVTIADA

SEQ ID NO: 1145 - protein, 92 aa, Homo sapiens
VEPLREGYKYPVYGVQWHPEKAPYEWKNLDGISHAPNAVKTAFYLAEFFVNEARKNNHHFKSESEEEKALIYQFSPIYTGNISSFQQCYIFD

SEQ ID NO: 1146 - protein, 205 aa, Homo sapiens
MASPGCLLCVLGLLLCGAASLELSRPHGDTAKKPIIGILMQKCRNKVMKNYGRYYIAASYVKYLESAGARVVPVRLDLTEKDYEILFKSINGILFPGGSVDLRRSDYAKVAKIFYNLSIQSFDDGDYFPVWGTCLGFEELSLLISGECLLTATDTVDVAMPLNFTGGQLHSRMFQNFPTELLLSLAVEPLTANFHKWSLSVKVSH

SEQ ID NO: 1147 - protein, 143 aa, Homo sapiens
MASPGCLLCVLGLLLCGAASLELSRPHGDTAKKPIIGILMQKCRNKVMKNYGRYYIAASYVKYLESAGARVVPVRLDLTEKDYEILFKSINGILFPGGSVDLRRSDYAKVAKIFYNLSIQVNISYCLLFQMGFCKFLCEWFIF

SEQ ID NO: 1148 - protein, 92 aa, Homo sapiens
MASPGCLLCVLGLLLCGAASLELSRPHGDTAKKPIIGILMQKCRNKVMKNYGRYYIAASYVKYLESAGARVVPVRLDLTEKDYEILFKSING

SEQ ID NO: 1149 - protein, 144 aa, Homo sapiens
LHGGFRNCLLNLKRTMVGKARSSNFTLSEKLDLLKLVKPYVKILEEHTNKHSVIVEKNRCWDIIAVNYNAIGVDRPPRTAQGLRTLYKRLKEYAKQELLQQKETQSDFKSNISEPTKKVMEMIPQISSFCLVRDRNHIQSSFGS

SEQ ID NO: 1150 - protein, 314 aa, Homo sapiens
LHGGFRNCLLNLKRTMVGKARSSNFTLSEKLDLLKLVKPYVKILEEHTNKHSVIVEKNRCWDIIAVNYNAIGVDRPPRTAQGLRTLYKRLKEYAKQELLQQKETQSDFKSNISEPTKKVMEMIPQISSFCLVRDRNHIQSANLDEEAQAGTSSLQVMLDHHPVAITVEVKQEEDIKPPPPLVLNSQQSDTLEQREEHELVHVMERSLSPSLSSVDMRMTSSPSSIPRRDDFFRHESGEHFRSLLGYDPQILQMLKEEHQIILENQKNFGLYVQEKRDGLKRRQQLEEELLRAKIEVEKLKAIRLRHDLPEYNSL

SEQ ID NO: 1151 - protein, 1027 aa, Homo sapiens
LAEMSNAKERKHAKKMRNQPTNVTLSSGFVADRGVKHHSGGEKPFQAQKQEPHPGTSRQRQTRVNPHSLPDPEVNEQSSSKGMFRKKGGWKAGPEGTSQEIPKYITASTFAQARAAEISAMLKAVTQKSSNSLVFQTLPRHMRRRAMSHNVKRLPRRLQEIAQKEAEKAVHQKKEHSKNKCHKARRCHMNRTLEFNRRQKKNIWLETHIWHAKRFHMVKKWGYCLGERPTVKSHRACYRAMTNRCLLQDLSYYCCLELKGKEEEILKALSGMCNIDTGLTFAAVHCLSGKRQGSLVLYRVNKYPREMLGPVTFIWKSQRTPGDPSESRQLWIWLHPTLKQDILEEIKAACQCVEPIKSAVCIADPLPTPSQEKSQTELPDEKIGKKRKRKDDGENAKPIKKIIGDGTRDPCLPYSWISPTTGIIISDLTMEMNRFRLIGPLSHSILTEAIKAASVHTVGEDTEETPHRWWIETCKKPDSVSLHCRQEAIFELLGGITSPAEIPAGTILGLTVGDPRINLPQKKSKALPNPEKCQDNEKVRQLLLEGVPVECTHSFIWNQDICKSVTENKISDQDLNRMRSELLVPGSQLILGPHESKIPILLIQQPGKVTGEDRLGWGSGWDVLLPKGWGMAFWIPFIYRGVRVGGLKESAVHSQYKRSPNVPGDFPDCPAGMLFAEEQAKNLLEKYKRRPPAKRPNYVKLGTLAPFCCPWEQLTQDWESRVQAYEEPSVASSPNGKESDLRRSEVPCAPMPKKTHQPSDEVGTSIEHPREAEEVMDAGCQESAGPERITDQEASENHVAATGSHLCVLRSRKLLKQLSAWCGPSSEDSRGGRRAPGRGQQGLTREACLSILGHFPRALVWVSLSLLSKGSPEPHTMICVPAKEDFLQLHEDWHYCGPQESKHSDPFRSKILKQKEKKKREKRQKPGRASSDGPAGEEPVAGQEALTLGLWSGPLPRVTLHCSRTLLGFVTQGDFSMAVGCGEALGFVSLTGLLDMLSSQPAAQRGLVLLRPPASLQYRFARIAIEV

SEQ ID NO: 1152 - protein, 141 aa, Homo sapiens
LRTIRSSSISYSQESGAAADDIKPCPRCAAYIIKMNDGSCNHMTCAVCGCEFCWLCMKEISDLHYLSPSGCTFWGKKPWSRKKKILWQLGTLVGAPVGIALIAGIAIPAMIIGIPVYVGRKVKCILLVSPLSYSKSLGVFF

SEQ ID NO: 1153 - protein, 29 aa, Homo sapiens
MLLVSLFKDTFSEPFLNKSGGPIGRLNCP

SEQ ID NO: 1154 - protein, 204 aa, Homo sapiens
VGWGCPWPLPSNRAPLAPPVVQELQQAISKLEARLNVLEKSSPGHRATAPQTQHVSPMRQVEPPAKKPATPAEDDEDDDIDLFGSDNEEEDKEAAQLREERLRQYAEKKAKKPALVAKSSILLDVKPWDDETDMAQLEACVRSIQLDGLVWGASKLVPVGYGIRKLQIQCVVEDDKVGTDLLEEEITKFEEHVQSVDIAAFNKI

SEQ ID NO: 1155 - protein, 719 aa, Homo sapiens
LFSLHNKTSPHGLDFEVLECHLMEAPLGSILSPCPGRAATGRAGTGRVGTGLRPPAVLQLCPLLAFYRCVRKMRSGKASCTLETVWEDKHKYEEAERRFYEHEATQAAASAQQLPAEGPAMNGPGQDDPEDADEAEAPDGGSRRDPRKSQDSRKPLQKKRKRSPKSGLGPADLALLGLSAERVWLDKSLFDQAESSYRQKLADVAAQAAWPPALAPWGLCTHGNQVACHHVTWGIWVNKSSFDQAERAFVEWSQALLLAPDGSRRQGTPNTGQQVAVPDLAHQPSPPVNGQPPLGSLQALVREVWLEKPRYDAAERGFYEALFDGHPPGKVRLQERAGLAEGARRGRRDRRGRNILGNKRAGLRRADGEAPSALPYCYFLQKDAEAPWLSKPAYDSAECRHHAAEALRVAWCLEAASLSHRPGPRSGLSVSSLRPNRKMATNFLAHEKIWFDKFKYDDAERRFYEQMNGPVAGASRQENGASVILRDIARARENIQKSLAGSSGPGASSGTSGDHGELVVRIASLEVENQSLRGVVQELQQAISKLEARLNVLEKSSPGHRATAPQTQHVSPMRQVEPPAKKPATPAEDDEDDDIDLFGSDNEEEDKEAAQLREERLRQYAEKKAKKPALVAKSSILLDVKPWDDETDMAQLEACVRSIQLDGLVWGASKLVPVGYGIRKLQIQCVVEDDKVGTDLLEEEITKFEEHVQSVDIAAFNKI

SEQ ID NO: 1156 - protein, 317 aa, Homo sapiens
VLHFPCAARAALPFISLPASADSSSLVAASLAGVRKMATNFLAHEKIWFDKFKYDDAERRFYEQMNGPVAGASRQENGASVILRDIARARENIQKSLAGSSGPGASSGTSGDHGELVVRIASLEVENQSLRGVVQELQQAISKLEARLNVLEKSSPGHRATAPQTQHVSPMRQVEPPAKKPATPAEDDEDDDIDLFGSDNEEEDKEAAQLREERLRQYAEKKAKKPALVAKSSILLDVKPWDDETDMAQLEACVRSIQLDGLVWGASKLVPVGYGIRKLQIQCVVEDDKVGTDLLEEEITKFEEHVQSVDIAAFNKI

SEQ ID NO: 1157 - protein, 316 aa, Homo sapiens
VLHFPCAARAALPFISLPASADSSSLVAASLAGVKMATNFLAHEKIWFDKFKYDDAERRFYEQMNGPVAGASRQENGASVILRDIARARENIQKSLAGSSGPGASSGTSGDHGELVVRIASLEVENQSLRGVVQELQQAISKLEARLNVLEKSSPGHRATAPQTQHVSPMRQVEPPAKKPATPAEDDEDDDIDLFGSDNEEEDKEAAQLREERLRQYAEKKAKKPALVAKSSILLDVKPWDDETDMAQLEACVRSIQLDGLVWGASKLVPVGYGIRKLQIQCVVEDDKVGTDLLEEEITKFEEHVQSVDIAAFNKI

SEQ ID NO: 1158 - protein, 85 aa, Homo sapiens
LGTEPSPPPALQSSGPGASSGTSGDHGELVVRIASLEVENQSLRGGEAPGQWVGAVPGPCHLTVLPLPPQWYRSCSRPSPSWRPG

SEQ ID NO: 1159 - protein, 147 aa, Homo sapiens
LVAASLAGVRKMATNFLAHEKIWFDKFKYDDAERRFYEQMNGPVAGASRQENGASVILRDIARARENIQKSLAGSSGPGASSGTSGDHGELVVRIASLEVENQSLRGGEAPGQWVGAVPGPCHLTVLPLPPQWYRSCSRPSPSWRPG

SEQ ID NO: 1160 - protein, 560 aa, Homo sapiens
LSVYKPRPFRSLGLPRAPSVVMAAPASRQVRRRARAAPRPRSAEDWWWDRLAPRGSGYHLLQSDSMLLVLSEPGPARPRAQRRASRRTPRQPPRGPSAAAKPKAGLRSEAAAAPAPAPAPTPTPEEGPDAGWGDRIPLEILVQIFGLLVAADGPMPFLGRAARVCRRWQEAASQPALWHTVTLSSPLVGRPAKGGVKAEKKLLASLEWLMPNRFSQLQRLTLIHWKSQVHPVLKLVGECCPRLTFLKLSGCHGVTADALVMLAKACCQLHSLDLQHSMVESTAVVSFLEEAGSRMRKLWLTYSSQTTAILGALLGSCCPQLQVLEVSTGINRNSIPLQLPVEALQKGCPQLQVLRLLNLMWLPKPPGRGVAPGPGFPSLEELCLASSTCNFVSNEVLGRLLHGSPNLRLLDLRGCARITPAGLQDLPCRELEQLHLGLYGTSDRLTLAKEGSPFLTQKWCHTLRELDLSGQGFSEKDLEQALAAFLSTPGGSHPALCSLNLRGTRVTPSTVSSVISGCPGLLYLNLESCRCLPRGLKRAYRGLEEVQWCLEQLLTSPSPS

SEQ ID NO: 1161 - protein, 293 aa, Homo sapiens
VVGAAASGAGSRKAGLAGVPGPPGRANRESPPGPVAMGRVIRGQRKGAGSVFRAHVKHRKGAARLRAVDFAERHGYIKGIVKDIIHDPGRGAPLAKVVFRDPYRFKKRTELFIAAEGIHTGQFVYCGKKAQLNIGNVLPVGTMPEGTIVCCLEEKPGDRGKLARASGNYATVISHNPETKKTRVKLPSGSKKVISSANRAVVGVVAGGGRIDKPILKAGRAYHKYKAKRNCWPRVRGVAMNPVEHPFGGGNHQHIGKPSTIRRDAPAGRKVGLIAARRTGRLRGTKTVQEKEN

SEQ ID NO: 1162 - protein, 178 aa, Homo sapiens
MRIFAVFIFMTYWHLLNAFTVTVPKDLYVVEYGSNMTIECKFPVEKQLDLAALIVYWEMEDKNIIQFVHGEEDLKVQHSSYRQRARLLKDQLSLGNAALQITDVKLQDAGVYRCMISYGGADYKRITVKVNAPYNKINQRILVVDPVTSEHELTCQAEGYPKAEVIWTSSDHQVLSGD

SEQ ID NO: 1163 - protein, 494 aa, Homo sapiens
VTLLVLLLGSELPGLGACLSPVKLVVQIGVARDYLEHITSIGPRTTGSPENEILTVHYLLEQIKLIEVQSNSLHKISVDVQRPTGSFSIDFLGGFTSYYDNITNVVVKLEPRDGAQHAVLANCHFDSVANSPGASDDAVSCSVMLEVLRVLSTSSEALHHAVIFLFNGAEENVLQASHGFITQHPWASLIRAFINLEAAGVGGKELVFQTGPENPWLVQAYVSAAKHPFASVVAQEVFQSGIIPSDTDFRIYRDFGNIPGIDLAFIENGYIYHTKYDTADRILTDSIQRAGDNILAVLKHLATSDMLAAASKYRHGNMVFFDVLGLFVIAYPSRIGSIINYMVVMGVVLYLGKKFLQPKHKTGNYKKDFLCGLGITLISWFTSLVTVLIIAVFISLIGQSLSWYNHFYVSVCLYGTATVAKIILIHTLAKRFYYMNASAQYLGEVFFDISLFVHCCFLVTLTYQGLCSAFISAVWVAFPLLTKLCVHKDFKQHD

SEQ ID NO: 1164 - protein, 158 aa, Homo sapiens
LSEVRAALGLALYLIALRTLVQLSLQQLVLRGAAGHRGEFDALQARDYLEHITSIGPRTTGSPENEILTVHYLLEQIKLIEVQSNSLHKISVDVQRPTGSFSIDFLGGFTSYYDNITNVVVKLEPRDGAQHAVLANCHFDSVANSPGQSWFHYSAPLG

SEQ ID NO: 1165 - protein, 94 aa, Homo sapiens
LRPSFESSLPLPLPLPLPPRGSGASVVRPTPRCRWEEARGKPLAGLSPLLAHRLEEPSPGPVGRLPPLVAVTRGPPQPPAGRGARHGFWSRFKR

SEQ ID NO: 1166 - protein, 114 aa, Homo sapiens
LRPSFESSLPLPLPLPLPPRGSGASVVRPTPRCRWEEARGKPLAGLSPLLAHRLEEPSPGPVGRLPPLVAVTRGPPQPPAGRGARHGFWSRVSVRAPFACCGGAHRDQPRRFKR

SEQ ID NO: 1167 - protein, 296 aa, Homo sapiens
LRVGSAPRPRPLGRRAVPRRAALVVRGQGRASRTSAATAKFVRAAWAAVARTMSAAAYMDFVAAQCLVSISNRAAVPEHGVAPDAERLRLPEREVTKEHGDPGDTWKDYCTLVTIAKSLLDLNKYRPIQTPSVCSDSLESPDEDMGSDSDVTTESGSSPSHSPEERQDPGSAPSPLSLLHPGVAAKGKHASEKRHKCPYSGCGKVYGKSSHLKAHYRVHTGERPFPCTWPDCLKKFSRSDELTRHYRTHTGEKQFRCPLCEKRFMRSDHLTKHARRHTEFHPSMIKRSKKALANAL

SEQ ID NO: 1168 - protein, 124 aa, Homo sapiens
LPLSPGRGCRSGRVATQRSWVGAGGVSAAGIPRGRPRAMIDSVKLRRDSAADFFSHYEYLCALQNSVPLPAVRACLREGVLDFNADRLRGVDWAPLLSTLKINKDLPLVSIKSFFQPWLGDTGL

SEQ ID NO: 1169 - protein, 333 aa, Homo sapiens
LTHRPGRRTMDAPRQVVNFGPGPAKLPHSVLLEIQKELLDYKGVGISVLEMSHRSSDFAKIINNTENLVRELLAVPDNYKVIFLQGGGCGQFSAVPLNLIGLKAGRCADYVVTGAWSAKAAEEAKKFGTINIVHPKLGSYTKIPDPSTWNLNPDASYVYYCANETVHGVEFDFIPDVKGAVLVCDMSSNFLSKPVDVSKFGVIFAGAQKNVGSAGVTVVIVRDDLLGFALRECPSVLEYKVQAGNSSLYNTPPCFSIYVMGLVLEWIKNNGGAAAMEKLSSIKSQTIYEIIDNSQGFYVSVGGIRASLYNAVTIEDVQKLAAFMKKFLEMHQL

SEQ ID NO: 1170 - protein, 104 aa, Homo sapiens
LGWTWFCLLRPLFALSFHFLQRASRMAHKQIYYSDKYFDEHYEYRHVMLPRELSKQVPKTHLMSEEEWRRLGVQQSLGWVHYMIHEPEPHILLFRRPLPKDQQK

SEQ ID NO: 1171 - protein, 379 aa, Homo sapiens
LPPAPAAPHLRPVPTALSCRPHLQPRTCRLHLQPRALPGSSMADQAPFDTDVNTLTRFVMEEGRKARGTGELTQLLNSLCTAVKAISSAVRKAGIAHLYGIAGSTNVTGDQVKKLDVLSNDLVMNMLKSSFATCVLVSEEDKHAIIVEPEKRGKYVVCFDPLDGSSNIDCLVSVGTIFGIYRKKSTDEPSEKDALQPGRNLVAAGYALYGSATMLVLAMDCGVNCFMLDPAIGEFILVDKDVKIKKKGKIYSLNEGYARDFDPAVTEYIQRKKFPPDNSAPYGARYVGSMVADVHRTLVYGGIFLYPANKKSPNGKLRLLYECNPMAYVMEKAGGMATTGKEAVLDVIPTDIHQRAPVILGSPDDVLEFLKVYEKHSAQ

SEQ ID NO: 1172 - protein, 570 aa, Homo sapiens
VVFNFAMVLLIFPAILSMDLYRREDRRLDIFCCFTSPCVSRVIQVEPQAYTDTHDNTRYSPPPPYSSHSFAHETQITMQSTVQLRTEYDPHTHVYYTTAEPRSEISVQPVTVTQDTLSCQSPESTSSTRDLLSQFSDSSLHCLEPPCTKWTLSSFAEKHYAPFLLKPKAKVVVIFLFLGLLGVSLYGTTRVRDGLDLTDIVPRETREYDFIAAQFKYFSFYNMYIVTQKADYPNIQHLLYDLHRSFSNVKYVMLEENKQLPKMWLHYFRDWLQGLQDAFDSDWETGKIMPNNYKNGSDDGVLAYKLLVQTGSRDKPIDISQLTKQRLVDADGIINPSAFYIYLTAWVSNDPVAYAASQANIRPHRPEWVHDKADYMPETRLRIPAAEPIEYAQFPFYLNGLRDTSDFVEAIEKVRTICSNYTSLGLSSYPNGYPFLFWEQYIGLRHWLLLFISVVLACTFLVCAVFLLNPWTAGIIVMVLALMTVELFGMMGLIGIKLSAVPVVILIASVGIGVEFTVHVALAFLTAIGDKNRRAVLALEHMFAPVLDGAVSTLLGVLMLAGSEFDFIVR

SEQ ID NO: 1173 - protein, 1124 aa, Homo sapiens
LGDYSVCFFFPLSPACVPFSRMAEAELHKERLQAIAEKRKRQTEIEGKRQQLDEQILLLQHSKSKVLREKWLLQGIPAGTAEEEEARRRQSEEDEFRVKQLEDNIQRLEQEIQTLESEESQISAKEQIILEKLKETEKSFKDFQKGFSSTDGDAVNYISSQLPDLPILCSRTAEPSPGQDGTSRAAGVGWENVLLKEGESASNATETSGPDMTIKKPPQLSEDDIWLKSEGDNYSATLLEPAASSLSPDHKNMEIEVSVAECKSVPGITSTPHPMDHPSAFYSPPHNGLLTDHHESLDNDVAREIRYLDEVLEANCCDSAVDGTYNGTSSPEPGAVVLVGGLSPPVHEATQPEPTERTASRQAPPHIELSNSSPDPMAEAERTNGHSPSQPRDALGDSLQVPVSPSSTTSSRCSSRDGEFTLTTLKKEAKFELRAFHEDKKPSKLFEDDEHEKEQYCIRKVRPSEEMLELEKERRELIRSQAVKKNPGIAAKWWNPPQEKTIEEQLDEEHLESHKKYKERKERRAQQEQLLLQKQLQQQQQQPPSQLCTAPASSHERASMIDKAKEDIVTEQIDFSAARKQFQLMENSRQAVAKGQSTPRLFSIKPFYRPLGSVNSDKPLTNPRPPSVGGPPEDSGASAAKGQKSPGALETPSAAGSQGNTASQGKEGPYSEPSKRGPLSKLWAEDGEFTSARAVLTVVKDDDHGILDQFSRSVNVSLTQEELDSGLDELSVRSQDTTVLETLSNDFSMDNISDSGASNETTNALQENSLADFSLPQTPQTDNPSEGRGEGVSKSFSDHGFYSPSSTLGDSPLVDDPLEYQAGLLVQNAIQQAIAEQVDKAVSKTSRDGAEQQGPEATVEEAEAAAFGSEKPQSMFEPPQVSSPVQEKRDVLPKILPAEDRALRERGPPQPLPAVQPSGPINMEETRPEGSYFSKYSEAAELRSTASLLATQESDVMVGPFKLRSRKQRTLSMIEEEIRAAQEREEELKRQRQVLQSTQSPRTKNAPSLPSRTCYKTAPGKIEKVKPPPSPTTEGPSLQPDLAPEEAAGTQRPKNLMQTLMEDYETHKSKRRERMDDSSYTSKLLSCKVTSEVLEATRVNRRKSALALRWEAGIYANQEEEDNE

SEQ ID NO: 1174 - protein, 87 aa, Homo sapiens
MLKNVLMRKCGVHDREKFLVLDYFCQSSVLAVLYLILSLCYFPYQDVASECEVKCMPTFQFFKKGQKVGEFSGANKEKLEATINELV

SEQ ID NO: 1175 - protein, 142 aa, Homo sapiens
VPVYKGREQAASLEALFGALDPFPSVLTAARQTPAAKMVKQIESKTAFQEALDAAGDKLVVVDFSATWCGPCKMIKPFFHSLSEKYSNVIFLEVDVDDCQDVASECEVKCMPTFQFFKKGQKVGEFSGANKEKLEATINELV

SEQ ID NO: 1176 - protein, 1089 aa, Homo sapiens
LMPRTGFCCFTVSLFVWMDMSMCVSLSRCVCVYVSIHPPQCLNSLLVIEGKGLISKQPGTCDPYVKISLIPEDSRLRHQKTQTVPDCRDPAFHEHFFFPVQEEDDQKRLLVTVWNRASQSRQSGLIGCMSFGVKSLLTPDKEISGWYYLLGEHLGRTKHLKVARRRLRPLRDPLLRMPGGGDTENGKKLKITIPRGKDGFGFTICCDSPVRVQAVDSGGPAERAGLQQLDTVLQLNERPVEHWKCVELAHEIRSCPSEIILLVWRMVPQVKPGPDGGVLRRASCKSTHDLQSPPNKREKNCTHGVQARPEQRHSCHLVCDSSDGLLLGGWERYTEVAKRGGQHTLPALSRATAPTDPNYIILAPLNPGSQLLRPVYQEDTIPEESGSPSKGKSYTGLGKKSRLMKTVQTMKGHGNYQNCPVVRPHATHSSYGTYVTLAPKVLVFPVFVQPLDLCNPARTLLLSEELLLYEGRNKAAEVTLFAYSDLLLFTKEDEPGRCDVLRNPLYLQSVKLQEGSSEDLKFCVLYLAEKAECLFTLEAHSQEQKKRVCWCLSENIAKQQQLAASPPDSKMFETEADEKREMALEEGKGPGAEDSPPSKEPSPGQELPPGQDLPPNKDSPSGQEPAPSQEPLSSKDSATSEGSPPGPDAPPSKDVPPCQEPPPAQDLSPCQDLPAGQEPLPHQDPLLTKDLPAIQESPTRDLPPCQDLPPSQVSLPAKALTEDTMSSGDLLAATGDPPAAPRPAFVIPEVRLDSTYSQKAGAEQGCSGDEEDAEEAEEVEEGEEGEEDEDEDTSDDNYGERSEAKRSSMIETGQGAEGGLSLRVQNSLRRRTHSEGSLLQEPRGPCFASDTTLHCSDGEGAASTWGMPSPSTLKKELGRNGGSMHHLSLFFTGHRKMSGADTVGDDDEASRKRKSKNLAKDMKNKLGIFRRRNESPGAPPAGKADKMMKSFKPTSEEALKWGESLEKLLVHKYGLAVFQAFLRTEFSEENLEFWLACEDFKKVKSQSKMASKAKKIFAEYIAIQACKEVNLDSYTREHTKDNLQSVTRGCFDLAQKRIFGLMEKDSYPRFLRSDLYLDLINQKKMSPPL

SEQ ID NO: 1177 - protein, 103 aa, Homo sapiens
LGIPYHTVTSPQLDLKQRTKMVGLGSSEGSGPKGACGCQQKDHNGVRGLVGMQRLAAESPKRRGLRGFFLPRRRRRRTFHIWASSGGSRTCLGGSRRGWERSP

SEQ ID NO: 1178 - protein, 540 aa, Homo sapiens
MVSGILEPPLLNCSCFLFVSQMFETEADEKREMALEEGKGPGAEDSPPSKEPSPGQELPPGQDLPPNKDSPSGQEPAPSQEPLSSKDSATSEGSPPGPDAPPSKDVPPCQEPPPAQDLSPCQDLPAGQEPLPHQDPLLTKDLPAIQESPTRDLPPCQDLPPSQVSLPAKALTEDTMSSGDLLAATGDPPAAPRPAFVIPEVRLDSTYSQKAGAEQGCSGDEEDAEEAEEVEEGEEGEEDEDEDTSDDNYGERSEAKRSSMIETGQGAEGGLSLRVQNSLRRRTHSEGSLLQEPRGPCFASDTTLHCSDGEGAASTWGMPSPSTLKKELGRNGGSMHHLSLFFTGHRKMSGADTVGDDDEASRKRKSKNLAKDMKNKLGIFRRRNESPGAPPAGKADKMMKSFKPTSEEALKWGESLEKLLVHKYGLAVFQAFLRTEFSEENLEFWLACEDFKKVKSQSKMASKAKKIFAEYIAIQACKEVNLDSYTREHTKDNLQSVTRGCFDLAQKRIFGLMEKDSYPRFLRSDLYLDLINQKKMSPPL

SEQ ID NO: 1179 - protein, 196 aa, Homo sapiens
LCLWLLRAFPAAPGLATRTGECDCVSGSMAEKRHTRDSEAQRLPDSFKDSPSKGLGPCGWILVAFSFLFTVITFPISIWMCIKIIKEYERAIIFRLGRILQGGAKGPGLFFILPCTDSFIKVDMRTISFDIPPQEILTKDSVTISVDGVVYYRVQNATLAVANITNADSATRLLAQTTLRNVLGTKNLSQISSLRL

SEQ ID NO: 1180 - protein, 137 aa, Homo sapiens
LATRTGECDCVSGSMAEKRHTRDSEAQRLPDSFKDSPSKGLGPCGWILVAFSFLFTVITFPISIWMCIKVIAAEGEMNASRALKEASMVITESPAALQLRYLQTLTTIAAEKNSTIVFPLPIDMLQGIIGAKHSHLG

SEQ ID NO: 1181 - protein, 177 aa, Homo sapiens
LSSAGNSGGVGRIGPRHLLAMGDVLSTHLDDARRQHIAEKTGKILTEFLQFYEDQYGVALFNSMRHEIEGTGLPQAQLLWRKVPLDERIVFSGNLFQHQEDSKKWRNRFSLVPHNYGLVLYENKAAYERQVPPRAVINSAGYKILTSVDQYLELIGNSLPGSSWWKTRTRRWCCRPS

SEQ ID NO: 1182 - protein, 575 aa, Homo sapiens
MEGAGGGSVKHEDAVLLLQDDRHHDRGHNESRIAGSHVVEDINKRREPLPSLEAVYLITPSEKSVHSLISDFKDPPTAKYRAAHVFFTDSCPDALFNELVKSRAAKVIKTLTEINIAFLPYESQVYSLDSADSFQSFYSPHKAQMKNPILERLAEQIATLCATLKEYPAVRYRGEYKDNALLAQLIQDKLDAYKADDPTMGEGPDKARSQLLILDRGFDPSSPVLHELTFQAMSYDLLPIENDVYKYETSGIGEARVKEVLLDEDDDLWIALRHKHIAEVSQEVTRSLKDFSSSKRMNTGEKTTMRDLSQMLKKMPQYQKELSKYSTHLHLAEDCMKHYQGTVDKLCRVEQDLAMGTDAEGEKIKDPMRAIVPILLDANVSTYDKIRIILLYIFLKNGITEENLNKLIQHAQIPPEDSEIITNMAHLGVPIVTDSTLRRRSKPERKERISEQTYQLSRWTPIIKDIMEDTIEDKLDTKHYPYISTRSSASFSTTAVSARYGHWHKNKAPGEYRSGPRLIIFILGGVSLNEMRCAYEVTQANGKWEVLIGSTHILTPQKLLDTLKKLNKTDEEISS

SEQ ID NO: 1183 - protein, 38 aa, Homo sapiens
LLLPFLLGFPVFEPWEAGCSRLLTLCLSLTNTKASISL

SEQ ID NO: 1184 - protein, 27 aa, Homo sapiens
LEMEGGCSPPIPHAGHRWKCQTVRVHA

SEQ ID NO: 1185 - protein, 433 aa, Homo sapiens
LGWAPLPVLLCRLPPLPEPDAMSSKGSVVLAYSGGLDTSCILVWLKEQGYDVIAYLANIGQKEDFEEARKKALKLGAKKVFIEDVSREFVEEFIWPAIQSSALYEDRYLLGTSLARPCIARKQVEIAQREGAKYVSHGATGKGNDQVRFELSCYSLAPQIKVIAPWRMPEFYNRFKGRNDLMEYAKQHGIPIPVTPKNPWSMDENLMHISYEAGILENPKNQAPPGLYTKTQDPAKAPNTPDILEIEFKKGVPVKVTNVKDGTTHQTSLELFMYLNEVAGKHGVGRIDIVENRFIGMKSRGIYETPAGTILYHAHLDIEAFTMDREVRKIKQGLGLKFAELVYTGFWHSPECEFVRHCIAKSQERVEGKVQVSVLKGQVYILGRESPLSLYNEELVSMNVQGDYEPTDATGFININSLRLKEYHRLQSKVTAK

SEQ ID NO: 1186 - protein, 358 aa, Homo sapiens
LCSLTGQSGAGNNWAKGHYTEGAELVDSVLDVVRKEAESCDCLQGFQLTHSLGGGTGSGMGTLLISKIREEYPDRIMNTFSVVPSPKVSDTVVEPYNATLSVHQLVENTDETYCIDNEALYDICFRTLKLTTPTYGDLNHLVSATMSGVTTCLRFPGQLNADLRKLAVNMVPFPRLHFFMPGFAPLTSRGSQQYRALTVPELTQQMFDAKNMMAACDPRHGRYLTVAAVFRGRMSMKEVDEQMLNVQNKNSSYFVEWIPNNVKTAVCDIPPRGLKMSATFIGNSTAIQELFKRISEQFTAMFRRKAFLHWYTGEGMDEMEFTEAESNMNDLVSEYQQYQDATAEEEGEFEEEAEEEVA

SEQ ID NO: 1187 - protein, 67 aa, Homo sapiens
LSSRSAARPATMTEQAISFAKDFLAGGIAAAISKTAVAPIERVKLLLQGGMSQRFKRPREDHLSSGV

SEQ ID NO: 1188 - protein, 35 aa, Homo sapiens
LCIFFFFSAEQGEVDMESHRNANAEPAVQRTLLEK

SEQ ID NO: 1189 - protein, 67 aa, Homo sapiens
VVATAQTRLRSYSCASLRFSSATMSDKPDMAEIEKFDKSKLKKTETQEKNPLPSKETIEQEKQAGES

SEQ ID NO: 1190 - protein, 234 aa, Homo sapiens
VDIYPLALRPCRHRRRSSAQRDTREPTMAPFEPLASGILLLLWLIAPSRACTCVPPHPQTAFCNSDLVIRAKFVGTPEVNQTTLYQRYEIKMTKMYKGFQALGDAADIRFVYTPAMESVCGYFHRSHNRSEEFLIAGKLQDGLLHITTCSFVAPWNSLSLAQRRGFTKTYTVGCEECTVFPCLSIPCKLQSGTHCLWTDQLLQGSEKGFQSRHLACLPREPGLCTWQSLRSQIA

SEQ ID NO: 1191 - protein, 27 aa, Homo sapiens
LLLCIALLSSYSIHLLLTCAGIAGTGS

SEQ ID NO: 1192 - protein, 275 aa, Homo sapiens
LPASPPVRSPARWGSMAGSPLLWGPRAGGVGLLVLLLLGLFRPPPALCARPVKEPRGLSAASPPLAETGAPRRFRRSVPRGEAAGAVQELARALAHLLEAERQERARAEAQEAEDQQARVLAQLLRVWGAPRNSDPALGLDDDPDAPAAQLARALLRARLDPAALAAQLVPAPVPAAALRPRPPVYDDGPAGPDAEEAGDETPDVDPELLRYLLGRILAGSADSEGVAAPRRLRRAADHDVGSELPPEGVLGALLRVKRLETPAPQVPARRLLPP

SEQ ID NO: 1193 - protein, 71 aa, Homo sapiens
LIPGWPENLSLVKSNIKICLLLILMLPAQQVHQRARMNYGCHECPCEAVGKPWLDCEGYLKSILESTRSSM

SEQ ID NO: 1194 - protein, 192 aa, Homo sapiens
LGCKPCDLKAQGWAQRQGCGVTGLRGPGSGTRRLRERSTGAKVWEAAGWSWTPASRRRSALTGAVPEAASCGSGSVAETREGRCGVRLCKLGRPGMDSSSSSSAAGLGAVDPQLQHFIEVETQKQRFQQLVHQMTELCWEKCMDKPGPKLDSRAEACFVNCVERFIDTSQFILNRLEQTQKSKPVFSESLSD

SEQ ID NO: 1195 - protein, 240 aa, Homo sapiens
LLPALPASTGTLESPQASSVGAHLPAAPDLAGQATSEPEKMAQSKLDCRSPVGLDCCNCCLDLAHRSGLQRGSSGENNNPGSPTVSNFRQLQEKLVFENLNTDKLNSIMRQDSLEPVLRDPCYLINEGICNRNIDQTMLSILLFFHSASGASVVAIDNKIEQAMDLVKNHLMYAVREEVEILKEQIRELVEKNSQLERENTLLKTLASPEQLEKFQSCLSPEEPAPESPQVPEAPGGSAV

SEQ ID NO: 1196 - protein, 237 aa, Homo sapiens
VSAPCRRLPLPLLPIPFPPPPPSLLLGGREGRSNSVRMAKGDPKKPKGKMSAYAFFVQTCREEHKKKNPEVPVNFAEFSKKCSERWKTMSGKEKSKFDEMAKADKVRYDREMKDYGPAKGGKKKKDPNAPKRPPSGFFLFCSEFRPKIKSTNPGISIGDVAKKLGEMWNNLNDSEKQPYITKAAKLKEKYEKDVADYKSKGKFDGAKGPAKVARKKVEEEDEEEEEEEEEEEEEEDE

SEQ ID NO: 1197 - protein, 66 aa, Homo sapiens
LSSLAVPLLVLTPFRSVLVFRSDSLFFVAATEDPGVAMGRRPARCYRYCKNKPYPKSRFCRGVPGK

SEQ ID NO: 1198 - protein, 147 aa, Homo sapiens
LSSLAVPLLVLTPFRSVLVFRSDSLFFVAATEDPGVAMGRRPARCYRYCKNKPYPKSRFCRGVPDAKIRIFDLGRKKAKVDEFPLCGHMVSDEYEQLSSEALEAARICANKYMVKSCGKDGFHIRVRLHPFHVIRINKMLSCAGADR

SEQ ID NO: 1199 - protein, 251 aa, Homo sapiens
LSSLAVPLLVLTPFRSVLVFRSDSLFFVAATEDPGVAMGRRPARCYRYCKNKPYPKSRFCRGVPDAKIRIFDLGRKKAKVDEFPLCGHMVSDEYEQLSSEALEAARICANKYMVKSCGKDGFHIRVRLHPFHVIRINKMLSCAGADRLQTGMRGAFGKPQGTVARVHIGQVIMSIRTKLQNKEHVIEALRRAKFKFPGRQKIHISKKWGFTKFNADEFEDMVAEKRLIPDGCGVKYIPSRGPLDKWRALHS

SEQ ID NO: 1200 - protein, 88 aa, Homo sapiens
MASCLLLLFLNGWSFTMLPGLILNSWPQAILPPWTPKLLGLEGFTHWPGWSAMARSQLTATSASWVQAILPPQPPQQLELQAPTTVPS

SEQ ID NO: 1201 - protein, 70 aa, Homo sapiens
LGVAVRPEATAGRTQCAAHSRSTFPRIIRAGDKIPGATNRRYRKTTLPRSLCGRADLGRRGQTDLGFLKN

SEQ ID NO: 1202 - protein, 77 aa, Homo sapiens
LPKPLSLTLALLLILQVYFEDEDRAELYRVPAKSTLLQVLQHQRYFVKALTPAFLVCVGSSPFCKNFLRGRKVYQIR

SEQ ID NO: 1203 - protein, 57 aa, Homo sapiens
LLLAFPYGLYLAFPYGLYSTYCLENVAHETPGYYQKERGRRSPLSPEPQHLLVWKGY

SEQ ID NO: 1204 - protein, 28 aa, Homo sapiens
LLAHHPILASLLLHLLSLPSPLPRKPPI

SEQ ID NO: 1205 - protein, 94 aa, Homo sapiens
VEDRMEEMCFGEATRMVWLPWVYGNLVSLNMVLSPSPPHPHRRDPSKIKWGDAGAEYVVESTGVFTTMEKAGVSAGGPAGGEADSALQRQDPGS

SEQ ID NO: 1206 - protein, 89 aa, Homo sapiens
LGGSAGHSPTLPPRSSSLLLLPPAPPPSCSPDEVRTGTYRQLFHPEQLITGKEDAANNYARGHYTIGKEIIDLVLDRIRKLVCFFSRIK

SEQ ID NO: 1207 - protein, 61 aa, Homo sapiens
LPGGGARRVCVLILAIGARACEPVGVAAAGTIGLSRGRHVAFRGAFMGLSGMGFLFLIVNR

SEQ ID NO: 1208 - protein, 63 aa, Homo sapiens
VDFCFVILTLAVSPPARRRAWLLVAIRKQQPFHLSFLHSGICSRAKGGRVLKEGLMSSSFSNS

SEQ ID NO: 1209 - protein, 69 aa, Homo sapiens
VDFCFVILTLAVSPPARRRAWLLVAIRKQQPFHLSFLHSGICSRAKGGRVLKEGLMSSSFSNSCKLCVG

SEQ ID NO: 1210 - protein, 52 aa, Homo sapiens
MQSGPPPGLGRGRTPGPRAPGAGGLPASRVSVVAEPKPRSPWGRWRSRPWPT

SEQ ID NO: 1211 - protein, 53 aa, Homo sapiens
LVVTAITCLSTVLSIDFKPSEIEVGVVTVENPKFRILTEAEIDAHLVALAERD

SEQ ID NO: 1212 - protein, 168 aa, Homo sapiens
LRGSRLSQLLTVFPSLQLYRFLARRTNSTFNQVVLKRLFMSRTNRPPLSLSRMVSGWSREHGRPGSRWVLSVWKGGRTWSSGSNQGIKGLSQPVASVELGLLVGTECPWAVGKSPGPPLLLFVRWRCPGGFRRLPQVITEFYVKGSAEGGPIEQSAFFFLSGAFPSWT

SEQ ID NO: 1213 - protein, 35 aa, Homo sapiens [sequence omitted]

SEQ ID NO: 1214 - protein, 36 aa, Homo sapiens
LLLIKTFPLKLASGLISLFQESLWLVGFQYAPVPDC

SEQ ID NO: 1215 - protein, 176 aa, Homo sapiens
LSGRVRGSKCACVLLTPQLRALLRSSQNSESKNFPEVSESPDRRARPHPQPPLLIPTSLQSWLLPSRRWGLWPSGAERQSPPPQSDFPLPPKGKHEERQDEHGYISRCFTRKYTLPPGVDPTQVSSSLSPEGTLTVEAPMPKLATQSNEITIPVTFESRAQLGGPEAAKSDETAAK

SEQ ID NO: 1216 - protein, 284 aa, Homo sapiens
LGSRETAGHLADEHRQWRAVETPGTTALRAITHPPAPPREPRPASPAPRAPPREPRPASPAPRAPHRRPRTASPASPAPPRALLALAESPRPHPLPDWGRYWTRRPRPIGAALAATQRSEAEQGRGRVGAGAGAAWSSCGVSGPGRGMGVLAAAARCLVRGADRMSKWTSKRGPRSFRGRKGRGAKGIGFLTSGWRFVQIKEMVPEFVVPDLTGFKLKPYVSYLAPESEETPLTAAQLFSEAVAPAIEKDFKDGTFDPDNLEKYGFEPTQEGKLFQLYPRNFLR

SEQ ID NO: 1217 - protein, 49 aa, Homo sapiens [sequence omitted]

SEQ ID NO: 1218 - protein, 179 aa, Homo sapiens
VVHVKDANGNSFATRLSNIFVIGKGNKPWISLPRGKGIRLTIAEERDKRLAAKQSRVCEPLHYKNLESSPLHSRCPAKCPPPKVPSKYRMKCLHMIRPEERWSFQNQIRRTEPSSVPNSGAPPLCFPPPLPETPALPWLFVCCARPPSLPLRVLSPFPHPPPARPPEYRLLSGGGNYCE

SEQ ID NO: 1219 - protein, 65 aa, Homo sapiens
LRGRTPNLSSRREGGREGRSTDPRAEEPPGPGPGAWGAGPGPRAWGAGAAKAARPGPTRLSGPRC

SEQ ID NO: 1220 - protein, 88 aa, Homo sapiens [sequence omitted]

SEQ ID NO: 1221 - protein, 14 aa, Homo sapiens
VAGPTRPPGIPGLK

SEQ ID NO: 1222 - protein, 127 aa, Homo sapiens [sequence omitted]

SEQ ID NO: 1223 - protein, 249 aa, Homo sapiens
LGAVPSPSLLPVLPARSYNESCPPDPAEQGGPKTCCTLDDVPLISKCGSYPPESCLFSLIGNMGAFMVALICLLRYGQLLEQSRHSWVNTTALITGCTNAAGLLVVGNFQVDHARSLHYVGAGVAFPAGLLFVCLHCALSYQGATAPLDLAVAYLRSVLAVIAFITLVLSGVFFVHESSQLQHGAALCEWVCVIDILIFYGTFSYEFGAVSSDTLVAALQPTPGRACKSSGSSSTSTHLNCAPESIAMI

SEQ ID NO: 1224 - protein, 9 aa, Homo sapiens
MMLPIPLKF

SEQ ID NO: 1225 - protein, 109 aa, Homo sapiens
MLSRGWLLLVQVLPPTPRISARLCHGGQRPPRTKGPCLGVRVRAEGAGASRISLNTSWLGPRRLKNTGLGWSWHLLTRKGIAEIQPLQPPSVHRWLTFSPTICFLLLKG

SEQ ID NO: 1226 - protein, 144 aa, Homo sapiens
LAGLLLVFPLLVALLGLGLVWEQTCFISTLPSTSGAVASTARGGRGAHPAQEQRSGGEETASLLTGPLCVTKFGKNMDLSQSFHVCSQLPAEKAKGSLPGKETGRKIKEFGELDLKCELKIKIKPGHIPVSKAKPTLSRGRLSI

SEQ ID NO: 1227 - protein, 106 aa, Homo sapiens
LLLQMSPVPLPSPQSAPRESARKGLVPEGLAAERGQVLVRPPGWASAPLFELVGAGGRDEGNSSGTQVPSNGRGWPGCSPHGAALESPRWRARARLPSLASKPGTS

SEQ ID NO: 1228 - protein, 26 aa, Homo sapiens
LTLSTLEFRVAIECQLWRWGAYQIYK

SEQ ID NO: 1229 - protein, 16 aa, Homo sapiens
LCYLTLLLLVMLQTGK

SEQ ID NO: 1230 - protein, 61 aa, Homo sapiens
LKKGGRGTLTHQPRRLLPANKNPSSATHVLNVSIVCLMPQRSPGSRSVTQAGVQWCDLGSS

SEQ ID NO: 1231 - protein, 97 aa, Homo sapiens
LVIITAWACEQEGESRLNLVQPNVNIFKFIIPNVVKYSTNCNLLIVSNPVDILTYVAWKISGFPKNCIIGSGCNLDSARFRYLMGEGLGVHPLSCHG

SEQ ID NO: 1232 - protein, 157 aa, Homo sapiens
VILHLKEDQTEYLEEMQVKEVVEKHSQFLGYPITLYLEKEREKEISDGKAEEEKGEKEEENKDDEEKPKIEDVGSDEEDDSGKDKKKKTKKIKEKYIDQEELNKTKPIWTRNTEDITQEEYGEFYKSLTNDWKDHLAVRYFSVEGQLEFRALLFIPP

SEQ ID NO: 1233 - protein, 120 aa, Homo sapiens
MKGGILPPFLCLCLVLLSLFPSDHFGNLKKLWSLPYMTTKPMILRNSHCGATKSTACWTVLRFTGGESRTGMGMKDMYQAVIWWKNLQIIWKPMSGTIRVSAETKLKNFFWTQAKKEPSW

SEQ ID NO: 1234 - protein, 20 aa, Homo sapiens
LFSTSAQCIRDLCPSQHYFL

SEQ ID NO: 1235 - protein, 67 aa, Homo sapiens
VLGLSGYRKASLRCSLLRIILFFSRCLRKCTMERRRWRLLPFRQKLPNSCPSSSIPSIPTRRFSFGS

SEQ ID NO: 1236 - protein, 611 aa, Homo sapiens
MRLYIRQVTLEQDSRMKFLKLLGYSKDELQKKVATWLKSDVGLGESPQPKGNDLNSDRQQAFCSQASKHTTKEASASSAFFDELVPQNMTPWEIPITKDIDGLLSQALLLGELGPAVELCLKEERFADAIILAQAGGTDLLKQTQERYLAKKKTKISSLLACVVQKNWKDVVCTCSLKNWREALALLLTYSGTEKFPELCDMLGTRMEQEGSRALTSEARLCYVCSGSVERLVECWAKCHQALSPMALQDLMEKVMVLNRSLEQLRGPHGVSPGPATTYRVTQYANLLAAQGSLATAMSFLPRDCAQPPVQQLRDRLFHAQGSAVLGQQSPPFPFPRIVVGATLHSKETSSYRLGSQPSHQVPTPSPRPRVFTPQSSPAMPLAPSHPSPYQGPRTQNISDYRAPGPQAIQPLPLSPGVRPGPQDSWKEAPAPRGNLQRNKLPETFMPPAPITAPVMSLTPELQGILPSQPPVSSVSHAPPGVPGELSLQLQHLPPEKMERKELPPEHQSLKSSFEALLQRCSLSATDLKTKRKLEEAAQRLEYLYEKLCEGTLSPHVVAGLHEVARCVDAGSFEQGLAVHAQVAGCSSFSEVSSFMPILKAVLIIAHKLLV

SEQ ID NO: 1237 - protein, 612 aa, Homo sapiens
MRLYIRQVTLEQDSRMKFLKLLGYSKDELQKKVATWLKSDVGLGESPQPKGNDLNSDRQQAFCSQASKHTTKEASASSAFFDELVPQNMTPWEIPITKDIDGLLSQALLLGELGPAVELCLKEERFADAIILAQAGGTDLLKQTQERYLAKKKTKISSLLACVVQKNWKDVVCTCSLKNWREALALLLTYSGTEKFPELCDMLGTRMEQEGSRALTSEARLCYVCSGSVERLVECWAKCHQALSPMALQDLMEKVMVLNRSLEQLRGPHGVSPGPATTYRVTQYANLLAAQGSLATAMSFLPRDCAQPPVQQLRDRLFHAQGSAVLGQQSPPFPFPRIVVGATLHSKETSSYRLGSQPSHQVPTPSPRPRVFTPQSSPAMPLAPSHPSPYQGPRTQNISDYRAPGPQAIQPLPLSPGVRPGPQDSWKEAPAPRGNLQRNKLPETFMPPAPITAPVMSLTPELQGILPSQPPVSSVSHAPPGVPGELSLQQLQHLPPEKMERKELPPEHQSLKSSFEALLQRCSLSATDLKTKRKLEEAAQRLEYLYEKLCEGTLSPHVVAGLHEVARCVDAGSFEQGLAVHAQVAGCSSFSEVSSFMPILKAVLIIAHKLLV

SEQ ID NO: 1238 - protein, 40 aa, Homo sapiens
LVVRWAVLVFRSSTAALPRAAEAARRSEKWPKTSALGRRS

SEQ ID NO: 1239 - protein, 90 aa, Homo sapiens
LTAPTLALLLLPKISCLLTSTHPRTQGSRAHFPRAWRLDPGEFLHPLQDPHSSPLWSLDHRWRWPELTCWLWGHSSCWPRMRRGTREYKG

SEQ ID NO: 1240 - protein, 289 aa, Homo sapiens
MGSPSPKTWLSRSSRRSTARSRAKRRSWQPLHRRTHPQWTLPTSACPACPATKLGTRYKIATRKAYGQALAKLGHASDRIIALDGDTKNSTFSEIFKKEHPDRFIECYIAEQNMVSIAVGCATRNRTVPFCSTFAAFFTRAFDQIRMAAISESNINLCGSHCGVSIGEDGPSQMALEDLAMFRSVPTSTVFYPSDGVATEKAVELAANTKGICFIRTSRPENAIIYNNNEDFQVGQAKKRSTSACWTPSPSSPWTENSFSTALVPPRAGSSPWRTIIMKVALVRLCPVQ

SEQ ID NO: 1241 - protein, 59 aa, Homo sapiens
MYHGARHFAWSSGYFRFRRGAFLSLFHCKAAAGEVVVLVSLSHPVPSSSLQRHTLSPPP

SEQ ID NO: 1242 - protein, 35 aa, Homo sapiens
LQGLAGGRSGPILKRYLATTYFHLRPFLPGGETLD

SEQ ID NO: 1243 - protein, 171 aa, Homo sapiens
MSCPVPACCALLLVLGLCRARPRNALLLLADDGGFESGAYNNSAIATPHLDALARRSLLFRNAFTSVSSCSPSRASLLTGLPQHQNGMYGLHQDVHHFNSFDKVRSLPLLLSQAGVRTGLSSSTSPSTTPTAVGTPSPSTEPSVRSLATERAAWVVSQTGPPRPTTHWTCW

SEQ ID NO: 1244 - protein, 28 aa, Homo sapiens
LVVQSPARRRRQGCCWPGYKHSSSATCS

SEQ ID NO: 1245 - protein, 125 aa, Homo sapiens
LDGSNVSKKNGARCSSLTGTASARSTSPPTAAQPTTAQARCVPPAPCETDFPVSREWGRPPSQFSLRPPLLARSLPSPQASSCAAQLPKRLSPLETVGRTVVASATRGKRLLPSLNWTPRAPESA

SEQ ID NO: 1246 - protein, 112 aa, Homo sapiens
LCVLWVLGVTFSLGSRESPADGFCPGLKQPESYGKGRAWLARGIFQVLKRQAYGACDPSRRTKWDLKIHSTSAHGGPGPAPARGHTADWAAGMPGLCWRPLWLAFTSVCLQE

SEQ ID NO: 1247 - protein, 26 aa, Homo sapiens
LRFFLVFCILFITMQETISSQEDFYL

SEQ ID NO: 1248 - protein, 106 aa, Homo sapiens
LCAADVGGSGERSGAAGASPGPQRQQLGPPPRPADRRTQEGGRGDPPPAGRSHELQRGEPTPAHHPPGVQGGDDTDRRPTRWHQGLSQRGGPHRPPGHHRGPWATS

SEQ ID NO: 1249 - protein, 102 aa, Homo sapiens
LCAADVGGSGERSGAAGASPGPQRQQLGPPPRPADRRTQEGGRGDPPPAGRSHELQRGEPTPAHHPPGVQGGDDTDRRPTRWHQGLSQRGGPHRPPGHHRGP

SEQ ID NO: 1250 - protein, 21 aa, Homo sapiens
MTIIGFRMLLSSSDASFLLAV

SEQ ID NO: 1251 - protein, 173 aa, Homo sapiens
LSWWGLGVERGSGRGVEVGVGVQPADAALPSQSAARRAGTCCANCQTTTTTLWRRNANGDPVCNACGLYYKLHNVNRPLTMKKEGIQTRNRKMSNKSKKSKKGAECFEELSKCMQEKSSPFSAAALAGHMAPVGHLPPFSHSGHILPTPTPIHPSSSLSFGHPHPSSMVTAMG

SEQ ID NO: 1252 - protein, 87 aa, Homo sapiens [sequence omitted]

SEQ ID NO: 1253 - protein, 83 aa, Homo sapiens
LRRMAVSGVEKTRGWLGLALLAALGDPRATPLSPGPGTSCWGGSGGPRPGYSLRVPRSPASRPSFQRPESFHCLSLPRATYVQ

SEQ ID NO: 1254 - protein, 28 aa, Homo sapiens
LSLPYLFLCPCLISPVLFLQTSRVKMGD

SEQ ID NO: 1255 - protein, 101 aa, Homo sapiens
VEEAEPWEGMRSKAWEKDEWKSWVDPILLTPYPLPCPLLSFSPLPPACRALVDELEWEIAQVDPKKTIQMGSFRINPDGSQSVVEVTVTVPPNKVAHSGFG

SEQ ID NO: 1256 - protein, 106 aa, Homo sapiens
VVFLKQLASGLLLVTGPLVLNRVPLRRTHQKFVIATSTKIDISNVKIPKHLTDAYFKKKKLRKPRHQEGEIFDTEKEVSFYLSSPVLALALLPGSEKKQVAQKEEK

SEQ ID NO: 1257 - protein, 138 aa, Homo sapiens
LHSSCTRRGSGSLRLCSVARVGQRRSSPGHTVFSSERSLLVRPRSHPEPKGEHYVTGSPTPENQRTSAAMSKPHSEAGTAFIQTQQLHAAMADTFLEHMCRLDIDSPPITARNTGIICTIVPCGDHQECAHSHGKLCF

SEQ ID NO: 1258 - protein, 46 aa, Homo sapiens
VVPLAGTNGETTTQGENCLILCPTNPTRAGLGAGRSGNHMPLPTVL

SEQ ID NO: 1259 - protein, 87 aa, Homo sapiens
LKEKIDRGSGKKLEDGPKFLKSGDAAIVDMVPGKPIVESFSDYPPLGHFAVRDMRQTVAVGVIKAVDKKAAGGGKVTKSAQTAQKAK

SEQ ID NO: 1260 - protein, 78 aa, Homo sapiens
LRGCSLEQRSFISVRLLSYLSACRHPMEDSMDMDMSPLRPQNYLFGCELKADKDYHFKVDNDENEHQLSLRTVLKLSK

SEQ ID NO: 1261 - protein, 142 aa, Homo sapiens
LEPDPAPETRPADAVPLLRRGRSWRKERGGRPVNRPGEAVLSRLPGATLSPDPACRCRATAMNSGAMRIHSKGHFQGGIQVKNEKNRPSLKSLKTDNRPEKSKCKPLWGKVFYLDLPSVTISEKLQKDIKDLGGVSENRTLA

SEQ ID NO: 1262 - protein, 24 aa, Homo sapiens
MFFTIIVMLIFTESKRKLEMIGSL

SEQ ID NO: 1263 - protein, 122 aa, Homo sapiens
VRGAGRRPCARRPLHPCPERSRRGRGTEANRVRSQYPRQQHQLLPSTDSREGDPQYLTPSRRWEQAPAMERDTAASPHDPSCMTPKPPPDSASDSMQNLGSGDLPQPREEASSSGDRLRTGV

SEQ ID NO: 1264 - protein, 9 aa, Homo sapiens
VPLPGPGRD

SEQ ID NO: 1265 - protein, 99 aa, Homo sapiens
MRPTMEFHSVLCGVTPTLLVMWLSPQMASLPSQAPGMEPCASGISQRKGTTTRRFVGHTKDVLSVAFSSDNRQIVSGSRDKTIKLWNTLGVCKYTVQVK

SEQ ID NO: 1266 - protein, 16 aa, Homo sapiens
LGLQVVTSKSDSVGGK

SEQ ID NO: 1267 - protein, 86 aa, Homo sapiens [sequence omitted]

SEQ ID NO: 1268 - protein, 42 aa, Homo sapiens
LFPVVEVICQQFYCFSSSVYRISLPLPNFSSLNLRGKHFISL

SEQ ID NO: 1269 - protein, 44 aa, Homo sapiens
VSLVLISAASCLPPGCCSCCPVGCAKCAQGCICKGASDKCSCCA

SEQ ID NO: 1270 - protein, 102 aa, Homo sapiens
VTAAALLSTRRKARQAKARRIAPRPASGPIRPIVRCPTVRYHTKVRAGRGFSLEELRVSTGSAAVSGRPRSPLCWPQSRDDILRNRCTALMKAHLNPFPSDC

SEQ ID NO: 1271 - protein, 74 aa, Homo sapiens
VSWPPPAAARKKGSTASLTARALDSLLGKNLPLPPVRDALSGISFDLPEAFLCRSRRHCTMAYLVLLRFADRAF

SEQ ID NO: 1272 - protein, 29 aa, Homo sapiens
LAMALHVPKAPGFAQMLKEGAKVRAEGKE

SEQ ID NO: 1273 - protein, 33 aa, Homo sapiens
LKYQALALALALALELRRSLGLSLAARSLDTFS

SEQ ID NO: 1274 - protein, 149 aa, Homo sapiens
MCCLCVLWVLGVTFSLGDGIQNSSAGAPLLHLLPGSYWASSSSSLYLYSTGSRESPADGFCPGLKQPESYGKGRAWLARGIFQVLKRQAYGACDPSRRTKWDLKIHSTSAHGGPGPAPARGHTADWAAGMPGLCWRPLWLAFTSVCLQE

SEQ ID NO: 1275 - protein, 13 aa, Homo sapiens
LVVGGYLFVLIGR

SEQ ID NO: 1276 - protein, 41 aa, Homo sapiens
VSMWKKRSSFTYLFLFVSLPGHSLFQRLNSLCNGVWVHLSL

SEQ ID NO: 1277 - protein, 49 aa, Homo sapiens
MRKFTILKGSMLFSISLYLISDLKLLMQFMNLRKKNVNGNQMKKMRFRN

SEQ ID NO: 1278 - protein, 133 aa, Homo sapiens
LGLFVSAVLRLSSVSLGPSLPRRALAGRLVARGGGGLGAGRDERRLHELRERRAGGGARLQLPAAGGRGGRCLLLRLPRPQVLLRRPAQLLPLRAQLHVVAQHWRSHRPVRSSSGSSRLHCYRLCALLPVHQL

SEQ ID NO: 1279 - protein, 133 aa, Homo sapiens
MGPWSRVRVAKCQMLVTCFFILVTAAGPLCGHHGDSYLLRGPLCCHPPSVPGEEPVPGCAPMGLLCGVEPGGPPDSGSRAERCSHREGGPGPHGRGLPVLLPGVLRTGAGGVLETPQPHPGGGRHAGHLRPGI

SEQ ID NO: 1280 - protein, 170 aa, Homo sapiens
VGEPGCAQRCQWLGRPAPAHVAARIWPARNVGAGRTGDWWLWTAPCRKRSPPATPTVHLLHRVHPSWRLSPSPGLPSGLRCPATVQFWLRASTSTARSVCPSGGSSSTSHSRGSTSGFPTASVSGCPGHEQAPDSSARLPLWSVWPGFLFSSPAGLRPTLCLQSYGQAEQ

SEQ ID NO: 1281 - protein, 91 aa, Homo sapiens
LGSSCWAGCGSPAGLPPAAQRVLCLALLYLCRFWLRASTSTARSVCPSGGSSSTSHSRGSTSGFPTASVSGCPGHEQAPDSSARLPLWSVW

SEQ ID NO: 1282 - protein, 115 aa, Homo sapiens
LPPPGPTVVFAGAAVALGLGRGGGRGEEKAAAEAGERRKEAAARRAQQLRRRPGSWECRCGALVGADPAGPGRGKESPARPWRTTRNWTTNGSRISRTKAATWRTTSPLKKTPPA

SEQ ID NO: 1283 - protein, 19 aa, Homo sapiens
MYYLNLLLMCNNTLALELL

SEQ ID NO: 1284 - protein, 84 aa, Homo sapiens
LSPARPGSGRWLQLSFLALLCSVRAALELCSPGRSPSTSSAAEEPSASAPAPLSSAAPIPGSSLRGVELFPMTVLIRLHYTFVC

SEQ ID NO: 1285 - protein, 25 aa, Homo sapiens
LDLDSRLLGASAMRRRKKERRPSCN

SEQ ID NO: 1286 - protein, 21 aa, Homo sapiens
VRVPGVGVFVLLLVSVRSPAV

SEQ ID NO: 1287 - protein, 8 aa, Homo sapiens
LFGFLLFS

SEQ ID NO: 1288 - protein, 89 aa, Homo sapiens
LQTEPRRVCAAAAVASVFASPQRQDKGPYRGIRLPPVFRRERKNKIYLGKLYLPELARAFFKKTFVKLNKLKVNTLRVVVTDQKYGQTS

SEQ ID NO: 1289 - protein, 115 aa, Homo sapiens
MPLFFLILDIFLFPFNSWFLPKRSHVRTSLGMCLQEKCGLPSSPWMPVGSLPHPGCLWAAFLTLDACGLPSSPWMPVGSLPHPGCLWAAFLTLDACGQPSSPWMPVGSLPHPGCL

SEQ ID NO: 1290 - protein, 84 aa, Homo sapiens
LKGHLLLVRKEIIARRASIRRVSITRSNRSGNTIKKEKKGISGFPGRGGASLLGSCSSRRFLNTAFYALYNLASHTFTLTLYDF

SEQ ID NO: 1291 - protein, 76 aa, Homo sapiens
MTVCLYLTVLLTNNLLGSKGQHLLSKAQEEFEVNGFAIVTINGCYIKFSVIFVCDSTVVWVNVHRHNWLNPKSLIS

SEQ ID NO: 1292 - protein, 14 aa, Homo sapiens
VTRNIPNKQQSSRN

SEQ ID NO: 1293 - protein, 38 aa, Homo sapiens
LSVVCVLISLISGMFFCLMNAILNAVLERGVGVRVYSI

SEQ ID NO: 1294 - protein, 41 aa, Homo sapiens
LCFSLQALLRCFTWLRLCQISMFLSLKCLNTRSSHLGAHCR

SEQ ID NO: 1295 - protein, 62 aa, Homo sapiens
LEPLWLLSAEWKRVLLFVSLAMALQLSREQGITLRGSAEIVAEFFLHPEKSLRKLSRMKSVQ

SEQ ID NO: 1296 - protein, 12 aa, Homo sapiens
LHDCGSESYGEK

SEQ ID NO: 1297 - protein, 56 aa, Homo sapiens
VYIYIYITKHQPWVVCSYINSKGKHTDCLSNHAKTLPGPVASAEKPTACRLLELYR

SEQ ID NO: 1298 - protein, 36 aa, Homo sapiens
LPSLGLRKQHRRCLSHGMDPSLPRRPCLLHRIRGLL

SEQ ID NO: 1299 - protein, 78 aa, Homo sapiens
LSSGWAEPLNLFYLVLSSLFLAPQASSHEENFTPSTAGAKRCPKDMATWVHSSDRPLTRAGLWRLSCMGPSNTKPVSL

SEQ ID NO: 1300 - protein, 716 aa, Homo sapiens [sequence omitted]

SEQ ID NO: 1301 - protein, 72 aa, Homo sapiens
LPRVSPFSRSPELHSRRPWAAGSASAEGQPDRPSASRNCPDHPPSQPLSERPSERLPGVLPTSQRPARWCPG

SEQ ID NO: 1302 - protein, 15 aa, Homo sapiens
MEKSLALMCTRILLF

SEQ ID NO: 1303 - protein, 65 aa, Homo sapiens
LQPGWSPAGAVRGGGDRVSWQLFCVGGHDRGLRSDEFPLRHRLSGLAAGQHEIQRQVGHRPGRLQ

SEQ ID NO: 1304 - protein, 19 aa, Homo sapiens
LALVLTAPKRNRISISSMS

SEQ ID NO: 1305 - protein, 262 aa, Homo sapiens
LESGKCHLPHHLWPLLGLLPRRLPLPGLYQRRPLRGHRASAPSRAAALHSRPRTLGLRHRVAAVTAPGAACAALQPGWAAGRPTTLSPHLPRGPHADGEGGERRGAGGPGLRAAAGRHGSLLRASGPHAAGRQGARAPACAARRGGSGGGLRGAAAALQPRPAAGYCRSTGCARAELPCQQTQGCRTAGDQRLGPRPLWPQSRSLRLPGPALPPGPAEAATGWELPLRASTPPRLPPPAPPFFLLSSHGDPQSLLGQLGLRI

SEQ ID NO: 1306 - protein, 27 aa, Homo sapiens
LYIVPKLLQGVIFALVLRNNSAVLKNI

SEQ ID NO: 1307 - protein, 49 aa, Homo sapiens
LAVLWFLCSPPIRVLLATQRKMLPTASLAQVGWTSTCPQGCVYCIGATV

SEQ ID NO: 1308 - protein, 167 aa, Homo sapiens
LERGLRAPVSGAGVCSDHHHRGGDDGDGGGDHVPAEPLQAVCTVLHQPAQPGAEERRCPVLRRMPVALGEHSVRQRNPRAAGLRPASAHRPPGRAALRPAGALPPLPAHLSVPAARDRPATHHLAVRRGGAPTLPGPLHPPASGPRAAAGTEPGVGARTPKQNHLRQ

SEQ ID NO: 1309 - protein, 243 aa, Homo sapiens
LAATRARRAGARLPRRAPPACGAPAPGAGRSPPRPPPSPPRPAPRRRAVHAPLDGGQQHRRRRRRAAQCLLHVQLQTLFVPEHGDHGAGVCSDHHHRGGDDGDGGGDHVPAEPLQAVCTVLHQPAQPGAEERRCPVLRRMPVALGEHSVRQRNPRAAGLRPASAHRPPGRAALRPAGALPPLPAHLSVPAARDRPATHHLAVRRGGAPTLPGPLHPPASGPRAAAGTEPGVGARTPKQNHLRQ

SEQ ID NO: 1310 - protein, 189 aa, Homo sapiens
LAASLCLCRESGNPLPAPAFSEFFRMNSLWSSGAGVCSDHHHRGGDDGDGGGDHVPAEPLQAVCTVLHQPAQPGAEERRCPVLRRMPVALGEHSVRQRNPRAAGLRPASAHRPPGRAALRPAGALPPLPAHLSVPAARDRPATHHLAVRRGGAPTLPGPLHPPASGPRAAAGTEPGVGARTPKQNHLRQ

SEQ ID NO: 1311 - protein, 43 aa, Homo sapiens
LLMYWKCFLTFGSLCSHCPHPRPTTKNPAEAETTKRQSSLLLQ

SEQ ID NO: 1312 - protein, 17 aa, Homo sapiens
LPSPSLSGCTSSLVLMH

SEQ ID NO: 1313 - protein, 137 aa, Homo sapiens
MLPTLTAPTLALLLLPKISCLLTSTHPRTQGSRAHFPRAWRLDPGEFLHPLQDPHSSPLWSLDHRWRWPELTCWLWGHSSCWPRMRRGTRSFTCLRLGGCAGRHMLRLRCSRCTGVLTFVSIRARPLSWWRLLPTSP

SEQ ID NO: 1314 - protein, 48 aa, Homo sapiens
VVGFLSLSLSLLALPTQQRRPPARNGLPGASSSSFPKLNCPVSDSDFS

SEQ ID NO: 1315 - protein, 69 aa, Homo sapiens
LRARIPGYDVIAQAQSGTGKTATFAISILQQIELDLKATQALVLAPTRELAQQPPNTSRCLYWMKLTKC

SEQ ID NO: 1316 - protein, 38 aa, Homo sapiens
LLEALDCILPPTRPTDKPLCLPLQDVYKIGGIGTVPVG

SEQ ID NO: 1317 - protein, 38 aa, Homo sapiens
LAWILFILLYHQYHSWKVWCYLRIWPFLDQMDPYCQVF

SEQ ID NO: 1318 - protein, 25 aa, Homo sapiens
LQIIICSLFHLPLEGILILQTMLPT

SEQ ID NO: 1319 - protein, 15 aa, Homo sapiens
MPMIFTSLICYLNIL

SEQ ID NO: 1320 - protein, 16 aa, Homo sapiens
LIKRGLLLMHSIDLLL

SEQ ID NO: 1321 - protein, 23 aa, Homo sapiens
VPGGGGRRIRGLELATSAHPHHP

SEQ ID NO: 1322 - protein, 116 aa, Homo sapiens [sequence omitted]

SEQ ID NO: 1323 - protein, 92 aa, Homo sapiens
LPAAGRWEPLPPPGRAGFREQQWERQYQHHGHLKEYHFHTHRELAQSSHAQRRGHGALHRTSKADHQELRTSEHSAQSLCQEPPFALYKPVK

SEQ ID NO: 1324 - protein, 61 aa, Homo sapiens
LARGNHRLFSRILFFSHLLAFFFLPPWLPSPNPAIPSSTPVLPSPAILSHPTCNLLSFAPP

SEQ ID NO: 1325 - protein, 38 aa, Homo sapiens
LFWVLFFTALRNYHSQKVHSYCDLFICYLGLKEPAYIY

SEQ ID NO: 1326 - protein, 24 aa, Homo sapiens
LGWESEGFLASFLLLLFSSLLLCR

SEQ ID NO: 1327 - protein, 8 aa, Homo sapiens
IFSLVWGL

SEQ ID NO: 1328 - protein, 45 aa, Homo sapiens
LIPAFLKISRSGLLLKKFPVRLTYVCKDGKKIQEHCSTKRIRGHQ

SEQ ID NO: 1329 - protein, 912 aa, Homo sapiens
RSADSGAAGAGRGGGGEAAGKEEEGESRSRRASMGRLASRPLLLALLSLALCRGRVVRVPTATLVRVVGTELVIPCNVSDYDGPSEQNFDWSFSSLGSSFVELASTWEVGFPAQLYQERLQRGEILLRRTANDAVELHIKNVQPSDQGHYKCSTPSTDATVQGNYEDTVQVKVLADSLHVGPSARPPPSLSLREGEPFELRCTAASASPLHTHLALLWEVHRGPARRSVLALTHEGRFHPGLGYEQRYHSGDVRLDTVGSDAYRLSVSRALSADQGSYRCIVSEWIAEQGNWQEIQEKAVEVATVVIQPSVLRAAVPKNVSVAEGKELDLTCNITTDRADDVRPEVTWSFSRMPDSTLPGSRVLARLDRDSLVHSSPHVALSHVDARSYHLLVRDVSKENSGYYYCHVSLWAPGHNRSWHKVAEAVSSPAGVGVTWLEPDYQVYLNASKVPGFADDPTELACRVVDTKSGEANVRFTVSWYYRMNRRSDNVVTSELLAVMDGDWTLKYGERSKQRAQDGDFIFSKEHTDTFNFRIQRTTEEDRGNYYCVVSAWTKQRNNSWVKSKDVFSKPVNIFWALEDSVLVVKARQPKPFFAAGNTFEMTCKVSSKNIKSPRYSVLIMAEKPVGDLSSPNETKYIISLDQDSVVKLENWTDASRVDGVVLEKVQEDEFRYRMYQTQVSDAGLYRCMVTAWSPVRGSLWREAATSLSNPIEIDFQTSGPIFNASVHSDTPSVIRGDLIKLFCIITVEGAALDPDDMAFDVSWFAVHSFGLDKAPVLLSSLDRKGIVTTSRRDWKSDLSLERVSVLEFLLQVHGSEDQDFGNYYCSVTPWVKSPTGSWQKEAEIHSKPVFITVKMDVLNAFKYPLLIGVGLSTVIGLLSCLIGYCSSHWCCKKEVQETRRERRRLMSMEMD

SEQ ID NO: 1330 - protein, 21 aa, Homo sapiens
LCRIHCLSLVFYSPWLLLISR

SEQ ID NO: 1331 - protein, 12 aa, Homo sapiens
MTSLLAALWMRL

SEQ ID NO: 1332 - protein, 11 aa, Homo sapiens
RCQASPKSAAG

SEQ ID NO: 1333 - protein, 20 aa, Homo sapiens
LASKMVCSFWKLYILLDLSR

SEQ ID NO: 1334 - protein, 541 aa, Homo sapiens
IVSFSSAGAAMAAVKTLNPKAEVARAQAALAVNISAARGLQDVLRTNLGPKGTMKMLVSGAGDIKLTKDGNVLLHEMQIQHPTASLIAKVATAQDDITGDGTTSNVLIIGELLKQADLYISEGLHPRIITEGFEAAKEKALQFLEEVKVSREMDRETLIDVARTSLRTKVHAELADVLTEAVVDSILAIKKQDEPIDLFMIEIMEMKHKSETDTSLIRGLVLDHGARHPDMKKRVEDAYILTCNVSLEYEKTEVNSGFFYKSAEEREKLVKAERKFIEDRVKKIIELKRKVCGDSDKGFVVINQKGIDPFSLDALSKEGIVALRRAKRRNMERLTLACGGVALNSFDDLSPDCLGHAGLVYEYTLGEEKFTFIEKCNNPRSVTLLIKGPNKHTLTQIKDAVRDGLRAVKNAIDDGCVVPGAGAVEVAMAEALIKHKPSVKGRAQLGVQAFADALLIIPKVLAQNSGFDLQETLVKIQAEHSESGQLVGVDLNTGEPMVAAEVGVWDNYCVKKQLLHSCTVIATNILLVDEIMRAGMSSLKG

SEQ ID NO: 1335 - protein, 666 aa, Homo sapiens
TGRQTSTVAPTPATARSRGGRVPIFPCPHPAPTLLSTSRVVTPAVSGSLLVMKALRLSASALFCLLLINGLGAAPPGRPEAQPPPLSSEHKEPVAGDAVPGPKDGSAPEVRGARNSEPQDEGELFQGVDPRALAAVLLQALDRPASPPAPSGSQQGPEEEAAEALLTETVRSQTHSLPAPESPEPAAPPRPQTPENGPEASDPSEELEALASLLQELRDFSPSSAKRQQETAAAETETRTHTLTRVNLESPGPERVWRASWGEFQARVPERAPLPPPAPSQFQARMPDSGPLPETHKFGEGVSSPKTHLGEALAPLSKAYQGVAAPFPKARRPESALLGGSEAGERLLQQGLAQVEAGRRQAEATRQAAAQEERLADLASDLLLQYLLQGGARQRGLGGRGLQEAAEERESAREEEEAEQERRGGEERVGEEDEEAAEAEAEAEEAERARQNALLFAEEEDGEAGAEDKRSQEETPGHRRKEAEGTEEGGEEEDDEEMDPQTIDSLIELSTKLHLPADDVVSIIEEVEEKRKRKKNAPPEPVPPPRAAPAPTHVRSPQPPPPAPAPARDELPDWNEVLPPWDREEDEVYPPGPYHPFPNYIRPRTLQPPSALRRRHYHHALPPSRHYPGREAQARRAQEEAEAEERRLQEQEELENYIEHVLLRRP

SEQ ID NO: 1336 - protein, 195 aa, Homo sapiens
TGRGRERGGGDTMSSPSPGKRRMDTDVVKLIESKHEVTILGGLNEFVVKFYGPQGTPYEGGVWKVRVDLPDKYPFKSPSIGFMNKIFHPNIDEASGTVCLDVINQTWTALYDLTNIFESFLPQLLAYPNPIDPLNGDAAAMYLHRPEEYKQKIKEYIQKYATEEALKEQEEGTGDSSSESSMSDFSEDEAQDMEL

SEQ ID NO: 1337 - protein, 26 aa, Homo sapiens
LQGLAGGRSGPILKRTESGFHNGRDQ

SEQ ID NO: 1338 - protein, 29 aa, Homo sapiens
MILLGENLKKRRRDPKSSYLRSSFFTHLC

SEQ ID NO: 1339 - protein, 799 aa, Homo sapiens
KMNLQPIFWIGLISSVCCVFAQTDENRCLKANAKSCGECIQAGPNCGWCTNSTFLQEGMPTSARCDDLEALKKKGCPPDDIENPRGSKDIKKNKNVTNRSKGTAEKLKPEDITQIQPQQLVLRLRSGEPQTFTLKFKRAEDYPIDLYYLMDLSYSMKDDLENVKSLGTDLMNEMRRITSDFRIGFGSFVEKTVMPYISTTPAKLRNPCTSEQNCTSPFSYKNVLSLTNKGEVFNELVGKQRISGNLDSPEGGFDAIMQVAVCGSLIGWRNVTRLLVFSTDAGFHFAGDGKLGGIVLPNDGQCHLENNMYTMSHYYDYPSIAHLVQKLSENNIQTIFAVTEEFQPVYKELKNLIPKSAVGTLSANSSNVIQLIIDAYNSLSSEVILENGKLSEGVTISYKSYCKNGVNGTGENGRKCSNISIGDEVQFEISITSNKCPKKDSDSFKIRPLGFTEEVEVILQYICECECQSEGIPESPKCHEGNGTFECGACRCNEGRVGRHCECSTDEVNSEDMDAYCRKENSSEICSNNGECVCGQCVCRKRDNTNEIYSGKFCECDNFNCDRSNGLICGGNGVCKCRVCECNPNYTGSACDCSLDTSTCEASNGQICNGRGICECGVCKCTDPKFQGQTCEMCQTCLGVCAEHKECVQCRAFNKGEKKDTCTQECSYFNITKVESRDKLPQPVQPDPVSHCKEKDVDDCWFYFTYSVNGNNEVMVHVVENPECPTGPDIIPIVAGVVAGIVLIGLALLLIWKLLMIIHDRREFAKFEKEKMNAKWDTGENPIYKSAVTTVVNPKYEGK

SEQ ID NO: 1340 - protein, 39 aa, Homo sapiens
LTRPRFFLFLDSIFAVAGTAVQSPICSSLSAPRSYTPSR

SEQ ID NO: 1341 - protein, 198 aa, Homo sapiens
IMIIYRDLISHDEMFSDIYKIREIADGLCLEVEGKMVSRTEGNIDDSLIGGNASAEGPEGEGTESTVITGVDIVMNHHLQETSFTKEAYKKYIKDYMKSIKGKLEEQRPERVKPFMTGAAEQIKHILANFKNYQFFIGENMNPDGMVALLDYREDGVTPYMIFFKDGLEMEKCDAKERNPCAFCLSLWRPRLNWGIHL

SEQ ID NO: 1342 - protein, 63 aa, Homo sapiens
MRQEKEMRIRMKVKLLHPLVMRLRYRSATRKKLRDSHLAMSPKQGEGARLSVWTLTHSRIIQR

SEQ ID NO: 1343 - protein, 17 aa, Homo sapiens
IWRKTSLWCFIAVHWLG

SEQ ID NO: 1344 - protein, 11 aa, Homo sapiens
LPSWVWFLWCF

SEQ ID NO: 1345 - protein, 153 aa, Homo sapiens
ITEAGAAKMKFNPFVTSDRSKNRKRHFNAPSHIRRKIMSSPLSKELRQKYNVRSMPIRKDDEVQVVRGHYKGQQIGKVVQVYRKKYVIYIERVQREKANGTTVHVGIHPSKVVITRLKLDKDRKKILERKAKSRQVGKEKGKYKEETIEKMQE

SEQ ID NO: 1346 - protein, 36 aa, Homo sapiens
LTGLVRPVWLLLWKQCCSYWKIKGKASPWWGKVWLR

SEQ ID NO: 1347 - protein, 34 aa, Homo sapiens
VPDVWCLVFLPLWAADIPPCFGFLVGSEGQQEAG

SEQ ID NO: 1348 - protein, 34 aa, Homo sapiens
VVMITWSMCGLVLLERVAGFLCRHSPSIKGLSRP

SEQ ID NO: 1349 - protein, 56 aa, Homo sapiens
VPFQWTWAVVAVVFLLSVQRWQVSKSPQKHAPDSVPLLSCNMLIRTTWHLPEQDFQ

SEQ ID NO: 1350 - protein, 628 aa, Homo sapiens
IPRSDSARPRSPRLPGASREPAGRRTPTPSSLCPSTRAPRPFRDPCPAGSAANLPAMETPSQRRATRSGAQASSTPLSPTRITRLQEKEDLQELNDRLAVYIDRVRSLETENAGLRLRITESEEVVSREVSGIKAAYEAELGDARKTLDSVAKERARLQLELSKVREEFKELKARNTKKEGDLIAAQARLKDLEALLNSKEAALSTALSEKRTLEGELHDLRGQVAKLEAALGEAKKQLQDEMLRRVDAENRLQTMKEELDFQKNIYSEELRETKRRHETRLVEIDNGKQREFESRLADALQELRAQHEDQVEQYKKELEKTYSAKLDNARQSAERNSNLVGAAHEELQQSRIRIDSLSAQLSQLQKQLAAKEAKLRDLEDSLARERDTSRRLLAEKEREMAEMRARMQQQLDEYQELLDIKLALDMEIHAYRKLLEGEEERLRLSPSPTSQRSRGRASSHSSQTQGGGSVTKKRKLESTESRSSFSQHARTSGRVAVEEVDEEGKFVRLRNKSNEDQSMGNWQIKRQNGDDPLLTYRFPPKFTLKAGQVVTIWAAGAGATHSPPTDLVWKAQNTWGCGNSLRTALINSTGEEVAMRKLVRSVTVVEDDEDEDGDDLLHHHHVSGSRR

SEQ ID NO: 1351 - protein, 35 aa, Homo sapiens
VTFVRPANLIKILLESALLVSYLCQISSWETAVTT

SEQ ID NO: 1352 - protein, 262 aa, Homo sapiens
IPVPDFIMGNSCYNIVATLLLVLNFERTRSLQDPCSNCPAGTFCDNNRNQICSPCPPNSFSSAGGQRTCDICRQCKGVFRTRKECSSTSNAECDCTPGFHCLGAGCSMCEQDCKQGQELTKKGCKDCCFGTFNDQKRGICRPWTNCSLDGKSVLVNGTKERDVVCGPSPADLSPGASSVTPPAPAREPGHSPQIISFFLALTSTALLFLLFFLTLRFSVVKRGRKKLLYIFKQPFMRPVQTTQEEDGCSCRFPEEEEGGCEL

SEQ ID NO: 1353 - protein, 125 aa, Homo sapiens
IQCEPLEAPELGTMDCTHPLGNFSFSSQCAFSCSEGTNLTGIEETTCGPFGNWSSPEPTCQVIQCEPLSAPDLGIMNCSHPLASFSFTSACTFICSEGTELIGKKKTICESSGIWSNPSPICQSE

SEQ ID NO: 1354 - protein, 60 aa, Homo sapiens
RIVKMKKKIIKMCANNGRRHLKQLLNRERCSWKMWAVRKNKKRRMRHHSRRKIPAAMKIS

SEQ ID NO: 1355 - protein, 322 aa, Homo sapiens
IGRRGQALMLVSGRRRLLTVLLQAQKWPFQPSRDMRLVQFRAPHLVGPHLGLETGNGGGVINLNAFDPTLPKTMTQFLEQGEATLSVARRALAAQLPVLPRSEVTFLAPVTRPDKVVCVGMNYVDHCKEQNVPVPKEPIIFSKFASSIVGPYDEVVLPPQSQEVDWEVELAVVIGKKGKHIKATDAMAHVAGFTVAHDVSARDWQMRRNGKQWLLGKTFDTFCPLGPALVTKDSVADPHNLKICCRVNGEVVQSGNTNQMVFKTEDLIAWVSQFVTFYPGDVILTGTPPGVGVFRKPPVFLKKGDEVQCEIEELGVIINKVV

SEQ ID NO: 1356 - protein, 83 aa, Homo sapiens
ISESAGSGQPRAEGLGAGAAGPLRAMAAPVKGNRKQSTEGDALDPPASPKPAGKQNGIQNPISLELTCGRSTKQWRSWGPMSW

SEQ ID NO: 1357 - protein, 87 aa, Homo sapiens
IFALFLIRLLARRSRLRRAPPPPPRTPAALSPESLNSRFLFNPLHRITGVPHHVRRSRRHQLRNHHQGLKGEEGSCGRGRKWKRRPC

SEQ ID NO: 1358 - protein, 53 aa, Homo sapiens
VQSNFELPLCSLKRQELRVVGLLTRTFPWASRVYSSPWLSSKHASTLITRNMP

SEQ ID NO: 1359 - protein, 93 aa, Homo sapiens
IACLIVAVAALPLLSQRERDTSGQAQPQPQQQPPRRHGGARHKERGCLRGGVGGSLCRMTIRGPAPAPPHLRLPTSKPRKKQTPPRRRRVKSA

SEQ ID NO: 1360 - protein, 14 aa, Homo sapiens
IVWFIFVFISFKIM

SEQ ID NO: 1361 - protein, 646 aa, Homo sapiens
ISVCPRVRPVPACRTMESYHKPDQQKLQALKDTANRLRISSIQATTAAGSGHPTSCCSAAEIMAVLFFHTMRYKSQDPRNPHNDRFVLSKGHAAPILYAVWAEAGFLAEAELLNLRKISSDLDGHPVPKQAFTDVATGSLGQGLGAACGMAYTGKYFDKASLPSSWDYSYRVYCLLGDGELSEGSVWEAMAFASIYKLDNLVAILDINRLGQSDPAPLQHQMDIYQKRCEAFGWHAIIVDGHSVEELCKAFGQAKHQPTAIIAKTFKGRGITGVEDKESWHGKPLPKNMAEQIIQEIYSQIQSKKKILATPPQEDAPSVDIANIRMPSLPSYKVGDKIATRKAYGQALAKLGHASDRIIALDGDTKNSTFSEIFKKEHPDRFIECYIAEQNMVSIAVGCATRNRTVPFCSTFAAFFTRAFDQIRMAAISESNINLCGSHCGVSIGEDGPSQMALEDLAMFRSVPTSTVFYPSDGVATEKAVELAANTKGICFIRTSRPENAIIYNNNEDFQVGQAKVVLKSKDDQVTVIGAGVTLHEALAAAELLKKEKINIRVLDPFTIKPLDRKLILDSARATKGRILTVEDHYYEGGIGEAVSSAVVGEPGITVTHLAVNRVPRSGKPAELLKMFGIDRDAIAQAVRGLITKA

SEQ ID NO: 1362 - protein, 105 aa, Homo sapiens
LPPPGPTVVFAGAAVALGLGRGGGRGEEKAAAEAGERRKEAAARRAQQLRRRPGSWECRCGALVGADPAGPGRGKESPARPWRTTRNWTTNGSRISRTKAATWRL

SEQ ID NO: 1363 - protein, 11 aa, Homo sapiens
VRYFFLQVWLF

SEQ ID NO: 1364 - protein, 43 aa, Homo sapiens
LRGGEAWRAAAAGQGTGAEPEPEPTGGGRTGTPESRALPTIRF

SEQ ID NO: 1365 - protein, 37 aa, Homo sapiens
LDLFVMTIWQLFAVLIVLFAKSREISTEGEPCVLSKN

SEQ ID NO: 1366 - protein, 19 aa, Homo sapiens
VELLLITMVVISSLNAGFI

SEQ ID NO: 1367 - protein, 38 aa, Homo sapiens
LATPEKTSAPTGVFHRVAGSWKSQERLRALDLSFSAHG

SEQ ID NO: 1368 - protein, 117 aa, Homo sapiens
LAFLQSPRAILPGNFFEKNAQIQGGPWGGGSGKTCAPGRSDPGWECGAGGGPGEAAGSRDRRSGGRVCGAPAEPTDFAASTAATGGTRGRAWDWGQARGAAGTHHAAGSKNASGWIR

SEQ ID NO: 1369 - protein, 63 aa, Homo sapiens
LLKRGFAMILGTGMMNGTILSKWLPQTHPWPEVDFSTTHWKKYTYLSFATSSEGQSLSFQTKC

SEQ ID NO: 1370 - protein, 13 aa, Homo sapiens
IPTPASLPRQWGS

SEQ ID NO: 1371 - protein, 90 aa, Homo sapiens
LPALTLSPLLLATSRFLGCLCPLCGQRGRTFGPGPGGGGGSLRPPPLPLPPPYPPRSGKRRRLRHGLGSRRSRRGRWRQDPDAALPPGAN

SEQ ID NO: 1372 - protein, 269 aa, Homo sapiens
IFTEQSMITFLPLLLGLSLGCTGAGGFVAHVESTCLLDDAGTPKDFTYCISFNKDLLTCWDPEENKMAPCEFGVLNSLANVLSQHLNQKDTLMQRLRNGLQNCATHTQPFWGSLTNRTRPPSVQVAKTTPFNTREPVMLACYVWGFYPAEVTITWRKNGKLVMPHSSAHKTAQPNGDWTYQTLSHLALTPSYGDTYTCVVEHTGAPEPILRDWTPGLSPMQTLKVSVSAVTLGLGLIIFSLGVISWRRAGHSSYTPLPGSNYSEGWHIS

SEQ ID NO: 1373 - protein, 31 aa, Homo sapiens
KESPSPLSAAWLAAAASSVFLASFMRKLAEC

SEQ ID NO: 1374 - protein, 22 aa, Homo sapiens
KLFQLLTWLSMKSSLTVTLTQS

SEQ ID NO: 1375 - protein, 390 aa, Homo sapiens
TPAVHAFGPPWLTHRPGRRTMDAPRQVVNFGPGPAKLPHSVLLEIQKELLDYKGVGISVLEMSHRSSDFAKIINNTENLVRELLAVPDNYKVIFLQGGGCGQFSAVPLNLIGLKAGRCADYVVTGAWSAKAAEEAKKFGTINIVHPKLGSYTKIPDPSTWNLNPDASYVYYCANETVHGVEFDFIPDVKGAVLVCDMSSNFLSKPVDVSKFGVIFAGAQKNVGSAGVTVVIVRDDLLGFALRECPSVLEYKVQAGNSSLYNTPPCFSIYVMGLVLEWIKNNGGAAAMEKLSSIKSQTIYEIIDNSQGFYVCPVEPQNRSKMNIPFRIGNAKGDDALEKRFLDKALELNMLSLKGHRSVGGIRASLYNAVTIEDVQKLAAFMKKFLEMHQL

SEQ ID NO: 1376 - protein, 30 aa, Homo sapiens
INQNLPSMMVLLLQLDCLTMDIYLRVQLKI

SEQ ID NO: 1377 - protein, 12 aa, Homo sapiens
MVELPMEVNLNA

SEQ ID NO: 1378 - protein, 7 aa, Homo sapiens
IVFIWMY

SEQ ID NO: 1379 - protein, 30 aa, Homo sapiens
KEFFSMICGMLLLQTYGTGRFSRRRLQSMV

SEQ ID NO: 1380 - protein, 16 aa, Homo sapiens
LICISKPPIFLCLMLI

SEQ ID NO: 1381 - protein, 17 aa, Homo sapiens
KWTLTHLMLMFMAQTGT

SEQ ID NO: 1382 - protein, 76 aa, Homo sapiens
LVILHLFSQLPAAWVLGPPCCSPPSCCFSPATAPCAATHLPTAPILTCWAPGSSRWAPAVPSAMSTARLWDHKKKK

SEQ ID NO: 1383 - protein, 25 aa, Homo sapiens
IILNSSLVLLVSWLLSMQILQVWNA

SEQ ID NO: 1384 - protein, 382 aa, Homo sapiens
IVKVSLHPAVMSKSESPKEPEQLRKLFIGGLSFETTDESLRSHFEQWGTLTDCVVMRDPNTKRSRGFGFVTYATVEEVDAAMNARPHKVDGRVVEPKRAVSREDSQRPGAHLTVKKIFVGGIKEDTEEHHLRDYFEQYGKIEVIEIMTDRGSGKKRGFAFVTFDDHDSVDKIVIQKYHTVNGHNCEVRKALSKQEMASASSSQRGRSGSGNFGGGRGGGFGGNDNFGRGGNFSGRGGFGGSRGGGGYGGSGDGYNGFGNDGGYGGGGPGYSGGSRGYGSGGQGYGNQGSGYGGSGSYDSYNNGGGGGFGGGSGSNFGGGGSYNDFGNYNNQSSNFGPMKGGNFGGRSSGPYGGGGQYFAKPRNQGGYGGSSSSSSYGSGRRF

SEQ ID NO: 1385 - protein, 73 aa, Homo sapiens
MLKSASLSGSPRAPRWASSSRWRRAASWTSTWRLQDQITKEFTKETENPVGNTHLLLTWMEHTNFVLVTGCPP

SEQ ID NO: 1386 - protein, 40 aa, Homo sapiens
TGPNPRVKGAVPKPERGRGGPAPPSDLQCRRPQDQTWPRT

SEQ ID NO: 1387 - protein, 558 aa, Homo sapiens
TRSDIAGVCGWLLLSGPCGVGLDLDSRLLGASAMRRSEVLAEESIVCLQKALNHLREIWELIGIPEDQRLQRTEVVKKHIKEEGETTILQLEKDLRTQVELMRKQKKERKQELKLLQEQDQELCEILCMPHYDIDSASVPSLEELNQFRQHVTTLRETKASRREEFVSIKRQIILCMEALDHTPDTSFERDVVCEDEDAFCLSLENIATLQKLLRQLEMQKSQNEAVCEGLRTQIRELWDRLQIPEEEREAVATIMSGSKAKVRKALQLEVDRLEELKMQNMKKVIEAIRVELVQYWDQCFYSQEQRQAFAPFCAEDYTESLLQLHDAEIVRLKNYYEVHKELFEGVQKWEETWRLFLEFERKASDPNRFTNRGGNLLKEEKQRAKLQKMLPKLEEELKARIELWEQEHSKAFMVNGQKFMEYVAEQWEMHRLEKERAKQERQLKNKKQTETEMLYGSAPRTPSKRRGLAPNTPGKARKLNTTTMSNATANSSIRPIFGGTVYHSPVSRLPPSGSKPVAASTCSGKKTPRTGRHGANKENLELNGSILSARTFKGFQI

SEQ ID NO: 1388 - protein, 9 aa, Homo sapiens
LPYYAVSKM

SEQ ID NO: 1389 - protein, 57 aa, Homo sapiens
IFSGRVPGSSSSFLLFLLLLHLRLLGDHCPLSAADTGCSSRLGLFTYAPHRSLGRPT

SEQ ID NO: 1390 - protein, 13 aa, Homo sapiens
LFLSFFLSFFFLF

SEQ ID NO: 1391 - protein, 33 aa, Homo sapiens
TEVSFFFVLFPGCCLLSWSAPEPSAPRRHASEN

SEQ ID NO: 1392 - protein, 18 aa, Homo sapiens
MTTSVLSLNGTFLLFPWC

SEQ ID NO: 1393 - protein, 42 aa, Homo sapiens
LAGPSRLTSPCRTQRVPLLHPRLPPPTSHVPGCRSRPGHPLS

SEQ ID NO: 1394 - protein, 57 aa, Homo sapiens
IFAARTRSERLRESETLSASIRRADPAGAAAAMDDREDLVYQAKLAEQAERYDVLWN

SEQ ID NO: 1395 - protein, 47 aa, Homo sapiens
LHSSVLEVRWPSGLRQRLRRARLSPQDVLPGRVSLPRWEVHLSAVRL

SEQ ID NO: 1396 - protein, 28 aa, Homo sapiens
VSSAILRVELGACRHFPNLGGPGLDFHE

SEQ ID NO: 1397 - protein, 61 aa, Homo sapiens
LTTLTTKRQKKKILWNNPFRQMLVLPWKLRQPYQEKLQPSLREDLLGFLLRRIWNRKKSIM

SEQ ID NO: 1398 - protein, 66 aa, Homo sapiens
ISRAPRLLLSEVSRGPSSPRPEVSAPRGLRGPRSPPAPCGWAVLDCSSCSSAAFELILRRRKSERW

SEQ ID NO: 1399 - protein, 11 aa, Homo sapiens
LVFLFLFFFFF

SEQ ID NO: 1400 - protein, 9 aa, Homo sapiens
LYWGYFFGF

SEQ ID NO: 1401 - protein, 70 aa, Homo sapiens
TRPPGEVGERLQQQRTFPAGRTGDKWQSPGANFCKPFLRLRLLHGGKDQKAAESHAREEGRALSFARTGC

SEQ ID NO: 1402 - protein, 34 aa, Homo sapiens
IGERSGRGWHLSLLLALVPVAEETPPQLPGVFYE

SEQ ID NO: 1403 - protein, 356 aa, Homo sapiens
TKQRSEDSMYTAIPQSGSPFPGSVQDPGLHVWRVEKLKPVPVAQENQGVFFSGDSYLVLHNGPEEVSHLHLWIGQQSSRDEQGACAVLAVHLNTLLGERPVQHREVQGNESDLFMSYFPRGLKYQEGGVESAFHKTSTGAPAAIKKLYQVKGKKNIRATERALNWDSFNTGDCFILDLGQNIFAWCGGKSNILERNKARDLALAIRDSERQGKAQVEIVTDGEEPAEMIQVLGPKPALKEGNPEEDLTADKANAQAAALYKVSDATGQMNLTKVADSSPFALELLISDDCFVLDNGLCGKIYIWKGRKANEKERQAALQVAEGFISRMQYAPNTQVEILPQGHESPIFKQFFKDWK

SEQ ID NO: 1404 - protein, 38 aa, Homo sapiens
LLPPSVRCPGSLRPALPPLPDPGARAPRGNCTSAELNE

SEQ ID NO: 1405 - protein, 20 aa, Homo sapiens
IFHLTPLLLLGFNYANVGGE

SEQ ID NO: 1406 - protein, 16 aa, Homo sapiens
TALFWVALLFQIPVVT

SEQ ID NO: 1407 - protein, 638 aa, Homo sapiens
ISVCPRVRPVPACRTMESYHKPDQQKLQALKDTANRLRISSIQATTAAGSGHPTSCCSAAEIMAVLFFHTMRYKSQDPRNPHNDRFVLSKGHAAPILYAVWAEAGFLAEAELLNLRKISSDLDGHPVPKQAFTDVATGSLGQGLGAACGMAYTGKYFDKASYRVYCLLGDGELSEGSVWEAMAFASIYKLDNLVAILDINRLGQSDPAPLQHQMDIYQKRCEAFGWHAIIVDGHSVEELCKAFGQAKHQPTAIIAKTFKGRGITGVEDKESWHGKPLPKNMAEQIIQEIYSQIQSKKKILATPPQEDAPSVDIANIRMPSLPSYKVGDKIATRKAYGQALAKLGHASDRIIALDGDTKNSTFSEIFKKEHPDRFIECYIAEQNMVSIAVGCATRNRTVPFCSTFAAFFTRAFDQIRMAAISESNINLCGSHCGVSIGEDGPSQMALEDLAMFRSVPTSTVFYPSDGVATEKAVELAANTKGICFIRTSRPENAIIYNNNEDFQVGQAKVVLKSKDDQVTVIGAGVTLHEALAAAELLKKEKINIRVLDPFTIKPLDRKLILDSARATKGRILTVEDHYYEGGIGEAVSSAVVGEPGITVTHLAVNRVPRSGKPAELLKMFGIDRDAIAQAVRGLITKA

SEQ ID NO: 1408 - protein, 93 aa, Homo sapiens
ILSQATRHFLLGTLFTNCLCGTFCFPCLGCQVAADMNECCLCGTSVAMRTLYRTRYGIPGSICDDYMATLCCPHCTLCQIKRDINRRRAMRTF

SEQ ID NO: 1409 - protein, 445 aa, Homo sapiens
IWAVCATRVGGAVGGTAKKPRSPEPRVTLLSQSKSGFWFGAERPGGLAFPRKAPPCPWPREQTKSTAGPITLGALRPAMVMEVGTLDAGGLRALLGERAAQCLLLDCRSFFAFNAGHIAGSVNVRFSTIVRRRAKGAMGLEHIVPNAELRGRLLAGAYHAVVLLDERSAALDGAKRDGTLALAAGALCREARAAQVFFLKGGYEAFSASCPELCSKQSTPMGLSLPLSTSVPDSAESGCSSCSTPLYDQGGPVEILPFLYLGSAYHASRKDMLDALGITALINVSANCPNHFEGHYQYKSIPVEDNHKADISSWFNEAIDFIDSIKNAGGRVFVHCQAGISRSATICLAYLMRTNRVKLDEAFEFVKQRRSIISPNFSFMGQLLQFESQVLAPHCSAEAGSPAMAVLDRGTSTTTVFNFPVSIPVHSTNSALSYLQSPITTSPSC

SEQ ID NO: 1410 - protein, 15 aa, Homo sapiens
ISILSVVWLTLRICP

SEQ ID NO: 1411 - protein, 14 aa, Homo sapiens
IRVLLLIIFAWEVE

SEQ ID NO: 1412 - protein, 62 aa, Homo sapiens
TNPPGGTNNSRCAALGAVTLTAKICSFTPEPARPRTPPEGRNSGHAAFKNYNTHGEGPRLHS

SEQ ID NO: 1413 - protein, 43 aa, Homo sapiens
VVFVHLEFLYLFVVGMRDDHIYFSQIHLELTLPGKLQQWERTM

SEQ ID NO: 1414 - protein, 55 aa, Homo sapiens
RLPQSRGLGAGTLLWTTFSLSAGRATQSPFACGWTTRRTTSTRAIAVQGRHQCSE

SEQ ID NO: 1415 - protein, 475 aa, Homo sapiens
RRRPGALFASLGVLLGPRPPPGIPRTRACSMGGVGEPGPREGPAQPGAPLPTFCWEQIRAHDQPGDKWLVIERRVYDISRWAQRHPGGSRLIGHHGAEDATDAFRAFHQDLNFVRKFLQPLLIGELAPEEPSQDGPLNAQLVEDFRALHQAAEDMKLFDASPTFFAFLLGHILAMEVLAWLLIYLLGPGWVPSALAAFILAISQAQSWCLQHDLGHASIFKKSWWNHVAQKFVMGQLKGFSAHWWNFRHFQHHAKPNIFHKDPDVTVAPVFLLGESSVEYGKKKRRYLPYNQQHLYFFLIGPPLLTLVNFEVENLAYMLVCMQWADLLWAASFYARFFLSYLPFYGVPGVLLFFVAVRVLESHWFVWITQMNHIPKEIGHEKHRDWVSSQLAATCNVEPSLFTNWFSGHLNFQIEHHLFPRMPRHNYSRVAPLVKSLCAKHGLSYEVKPFLTALVDIVRSLKKSGDIWLDAYLHQ

SEQ ID NO: 1416 - protein, 26 aa, Homo sapiens
LQNHETKVAMAVPAAAVAMAVAEDFN

SEQ ID NO: 1417 - protein, 29 aa, Homo sapiens
LARFLLRVMLFLDYSLIWSYWAPGHQGCF

SEQ ID NO: 1418 - protein, 20 aa, Homo sapiens
RMGSDFPWLLHAGTLQVWLL

SEQ ID NO: 1419 - protein, 8 aa, Homo sapiens
MSLSIRQQ

SEQ ID NO: 1420 - protein, 10 aa, Homo sapiens
MDMIFFIILL

SEQ ID NO: 1421 - protein, 47 aa, Homo sapiens
TARGAATRSDIAGVCGWLLLSGPCGVGLDLDSRLLGASAMRRRNSWI

SEQ ID NO: 1422 - protein, 15 aa, Homo sapiens
VQTTTFFRLWMCVMT

SEQ ID NO: 1423 - protein, 75 aa, Homo sapiens
LVVRWAVLVFRSSTAALPRAAEAARRSEKWPKTSALGERKWPEPSRLLVSPPVGKPPANSWPRKPPGKALPLPAG

SEQ ID NO: 1424 - protein, 77 aa, Homo sapiens
ILGATRFFRFYLGESTAIRHHGELHGRPDPRHHGQEGQHPQHVCHRPRGPWQVHADRLPGVQGGHHRLGPGRGDTLH

SEQ ID NO: 1425 - protein, 59 aa, Homo sapiens
IDTRFSFCAVATLALLGKLDAINVEKAIEFVLSCMNFDGGFGCRPGSESHAGQVIYEYR

SEQ ID NO: 1426 - protein, 17 aa, Homo sapiens
MRLFPYLIIHVLLLIRH

SEQ ID NO: 1427 - protein, 19 aa, Homo sapiens
KARRSCLLVIMLLTRTETV

SEQ ID NO: 1428 - protein, 9 aa, Homo sapiens
IIMLYLNYL

SEQ ID NO: 1429 - protein, 11 aa, Homo sapiens
MKIKHILLLGV

SEQ ID NO: 1430 - protein, 16 aa, Homo sapiens
IFLRQSSLTWLIWLSV

SEQ ID NO: 1431 - protein, 91 aa, Homo sapiens
MEMSFMVSQTQVLPVKGVQVLGALNKELDKTHKQSKKRKKQQKQRCIENENTLHRVGAGRASSSRAQLQNFLGFKYPLEVSIGYLVYTLCI

SEQ ID NO: 1432 - protein, 16 aa, Homo sapiens
ITCIIAGINFKLLFLF

SEQ ID NO: 1433 - protein, 15 aa, Homo sapiens
VQPLEVDQTRTHMPY

SEQ ID NO: 1434 - protein, 39 aa, Homo sapiens
LILVAFFLLFSVVCGFRCRANLRLVRVHVSGNRPCSWLS

SEQ ID NO: 1435 - protein, 662 aa, Homo sapiens
VMAFDVSCFFWVVLFSAGCKVITSWDQMCIEKEANKTYNCENLGLSEIPDTLPNTTEFLEFSFNFLPTIHNRTFSRLMNLTFLDLTRCQINWIHEDTFQSHHQLSTLVLTGNPLIFMAETSLNGPKSLKHLFLIQTGISNLEFIPVHNLENLESLYLGSNHISSIKFPKDFPARNLKVLDFQNNAIHYISREDMRSLEQAINLSLNFNGNNVKGIELGAFDSTIFQSLNFGGTPNLSVIFNGLQNSTTQSLWLGTFEDIDDEDISSAMLKGLCEMSVESLNLQEHRFSDISSTTFQCFTQLQELDLTATHLKGLPSGMKGLNLLKKLVLSVNHFDQLCQISAANFPSLTHLYIRGNVKKLHLGVGCLEKLGNLQTLDLSHNDIEASDCCSLQLKNLSHLQTLNLSHNEPLGLQSQAFKECPQLELLDLAFTRLHINAPQSPFQNLHFLQVLNLTYCFLDTSNQHLLAGLPVLRHLNLKGNHFQDGTITKTNLLQTVGSLEVLILSSCGLLSIDQQAFHSLGKMSHVDLSHNSLTCDSIDSLSHLKGIYLNLAANSINIISPRLLPILSQQSTINLSHNPLDCTCSNIHFLTWYKENLHKLEGSEETTCANPPSLRGVKLSDVKLSCGITAIGIFFLIVFLLLLAILLFFAVKYLLRWKYQHI

SEQ ID NO: 1436 - protein, 20 aa, Homo sapiens
RLWLLLRSAMAFLWQPLRRP

SEQ ID NO: 1437 - protein, 11 aa, Homo sapiens
LPWRLGFLSWF

SEQ ID NO: 1438 - protein, 38 aa, Homo sapiens
VFLKVILTLLLISYLHEYFSLFSVSLKIELPTPKYEIG

SEQ ID NO: 1439 - protein, 14 aa, Homo sapiens
IWKRGVSFSVLCSL

SEQ ID NO: 1440 - protein, 28 aa, Homo sapiens
VHLTTAFWLTLLDLTHTECSLSVRDKVS

SEQ ID NO: 1441 - protein, 29 aa, Homo sapiens
MTIWMRMIMYQWVGLIVLIQWIPLNQCQP

SEQ ID NO: 1442 - protein, 425 aa, Homo sapiens
TMRAPGCGRLVLPLLLLAAAALAEGDAKGLKEGETPGNFMEDEQWLSSISQYSGKIKHWNRFRDEVEDDYIKSWEDNQQGDEALDTTKDPCQKVKCSRHKVCIAQGYQRAMCISRKKLEHRIKQPTVKLHGNKDSICKPCHMAQLASVCGSDGHTYSSVCKLEQQACLSSKQLAVRCEGPCPCPTEQAATSTADGKPETCTGQDLADLGDRLRDWFQLLHENSKQNGSASSVAGPASGLDKSLGASCKDSIGWMFSKLDTSADLFLDQTELAAINLDKYEVCIRPFFNSCDTYKDGRVSTAEWCFCFWREKPPCLAELERIQIQEAAKKKPGIFIPSCDEDGYYRKMQCDQSSGDCWCVDQLGLELTGTRTHGSPDCDDIVGFSGDFGSGVGWEDEEEKETEEAGEEAEEEEGEAGEADDGGYIW

SEQ ID NO: 1443 - protein, 13 aa, Homo sapiens
MLLPKDAVLRLTD

SEQ ID NO: 1444 - protein, 22 aa, Homo sapiens
LLFESILRGTEREPDSPFGSIL

SEQ ID NO: 1445 - protein, 10 aa, Homo sapiens
MFLILVLISF

SEQ ID NO: 1446 - protein, 21 aa, Homo sapiens
MTMDHSKNLPLPGLLVLALWQ

SEQ ID NO: 1447 - protein, 25 aa, Homo sapiens
LTQDCALTLLLQLPLPGLLVLALWQ

SEQ ID NO: 1448 - protein, 39 aa, Homo sapiens
VTQSPFKSSITTSLLAWMPLLLIDSTSCERNIRRSSTAE

SEQ ID NO: 1449 - protein, 16 aa, Homo sapiens
RPPGLLPGAGTVKMPG

SEQ ID NO: 1450 - protein, 16 aa, Homo sapiens
LNMVLLLLSLILKRTW

SEQ ID NO: 1451 - protein, 15 aa, Homo sapiens
LNMVLLLLSLILKRT

SEQ ID NO: 1452 - protein, 189 aa, Homo sapiens
IMIIYRDLISHDEMFSDIYKIREIADGLCLEVEGKMVSRTEGNIDDSLIGGNASAEGPEGEGTESTVITGVDIVMNHHLQETSFTKEAYKKYIKDYMKSIKGKLEEQRPERVKPFMTGAAEQIKHILANFKNYQFFIGENMNPDGMVALLDYREDGVTPYMIFFKDGLEMEKCVSTRKWVKINNVKKTF

SEQ ID NO: 1453 - protein, 28 aa, Homo sapiens
IPKKEAPPASVRCRMAPLLMRWTSREDK

SEQ ID NO: 1454 - protein, 33 aa, Homo sapiens
MTTLRRSVSWGLAMAVWCSRSPTSLLAWSWPES

SEQ ID NO: 1455 - protein, 16 aa, Homo sapiens
IGLLVWTYYMDQSLSL

SEQ ID NO: 1456 - protein, 21 aa, Homo sapiens
LCLKFSIFVGCFLYMQKVISP

SEQ ID NO: 1457 - protein, 15 aa, Homo sapiens
MIWSILITCCCVLWT

SEQ ID NO: 1458 - protein, 35 aa, Homo sapiens
IFSGRVPGSSSSFLLFLLLLHLRLLGDHCPLSAAE

SEQ ID NO: 1459 - protein, 13 aa, Homo sapiens
LPSWVWFLWCFCK

SEQ ID NO: 1460 - protein, 3359 aa, Homo sapiens
MGRHVATSCHVAWLLVLISGCWGQVNRLPFFTNHFFDTYLLISEDTPVGSSVTQLLAQDMDNDPLVFGVSGEEASRFFAVEPDTGVVWLRQPLDRETKSEFTVEFSVSDHQGVITRKVNIQVGDVNDNAPTFHNQPYSVRIPEVGATGNTPVGTPIFIVNATDPDLGAGGSVLYSFQPPSQFFAIDSARGIVTVIRELDYETTQAYQLTVNATDQDKTRPLSTLANLAIIITDVQDMDPIFINLPYSTNIYEHSPPGTTVRIITAIDQDKGRPRGIGYTIVSGNTNSIFALDYISGVLTLNGLLDRENPLYSHGFILTVKGTELNDDRTPSDATVTTTFNILVIDINDNAPEFNSSEYSVAITELAQVGFALPLFIQVVDKDENLGLNSMFEVYLVGNNSHHFIISPTSVQGKADIRIRVAIPLDYETVDRYDFDLFANESVPDHVGYAKVKITLINENDNRPIFSQPLYNISLYENVTVGTSVLTVLATDNDAGTFGEVSYFFSDDPDRFSLDKDTGLIMLIARLDYELIQRFTLTIIARDGGGEETTGRVRINVLDVNDNVPTFQKDAYVGALRENEPSVTQLVRLRATDEDSPPNNQITYSIVSASAFGSYFDISLYEGYGVISVSRPLDYEQISNGLIYLTVMAMDAGNPPLNSTVPVTIEVFDENDNPPTFSKPAYFVSVVENIMAGATVLFLNATDLDRSREYGQESIIYSLEGSTQFRINARSGEITTTSLLDRETKSEYILIVRAVDGGVGHNQKTGIATVNITLLDINDNHPTWKDAPYYINLVEMTPPDSDVTTVVAVDPDLGENGTLVYSIQPPNKFYSLNSTTGKIRTTHAMLDRENPDPHEAELMRKIVVSVTDCGRPPLKATSSATVFVNLLDLNDNDPTFQNLPFVAEVLEGIPAGVSIYQVVAIDLDEGLNGLVSYRMPVGMPRMDFLINSSSGVVVTTTELDRERIAEYQLRVVASDAGTPTKSSTSTLTIHVLDVNDETPTFFPAVYNVSVSEDVPREFRVVWLNCTDNDVGLNAELSYFITGGNVDGKFSVGYRDAVVRTVVGLDRETTAAYMLILEAIDNGPVGKRHTGTATVFVTVLDVNDNRPIFLQSSYEASVPEDIPEGHSILQLKATDADEGEFGRVWYRILHGNHGNNFRIHVSNGLLMRGPRPLDRERNSSHVLIVEAYNHDLGPMRSSVRVIVYVEDINDEAPVFTQQQYSRLGLRETAGIGTSVIVVQATDRDSGDGGLVNYRILSGAEGKFEIDESTGLIITVNYLDYETKTSYMMNVSATDQAPPFNQGFCSVYITLLNELDEAVQFSNASYEAAILENLALGTEIVRVQAYSIDNLNQITYRFNAYTSTQAKALFKIDAITGVITVQGLVDREKGDFYTLTVVADDGGPKVDSTVKVYITVLDENDNSPRFDFTSDSAVSIPEDCPVGQRVATVKAWDPDAGSNGQVVFSLASGNIAGAFEIVTTNDSIGEVFVARPLDREELDHYILQVVASDRGTPPRKKDHILQVTILDINDNPPVIESPFGYNVSVNENVGGGTAVVQVRATDRDIGINSVLSYYITEGNKDMAFRMDRISGEIATRPAPPDRERQSFYHLVATVEDEGTPTLSATTHVYVTIVDENDNAPMFQQPHYEVLLDEGPDTLNTSLITIQALDLDEGPNGTVTYAIVAGNIVNTFRIDRHMGVITAAKELDYEISHGRYTLIVTATDQCPILSHRLTSTTTVLVNVNDINDNVPTFPRDYEGPFEVTEGQPGPRVWTFLAHDRDSGPNGQVEYSIMDGDPLGEFVISPVEGVLRVRKDVELDRETIAFYNLTICARDRGMPPLSSTMLVGIRVLDINDNDPVLLNLPMNITISENSPVSSFVAHVLASDADSGCNARLTFNITAGNRERAFFINATTGIVTVNRPLDRERIPEYKLTISVKDNPENPRIARRDYDLLLIFLSDENDNHPLFTKSTYQAEVMENSPAGTPLTVLNGPILALDADQDIYAVVTYQLLGAQSGLFDINSSTGVVTVRSGVIIDREAFSPPILELLLLAEDIGLLNSTAHLLITILDDNDNRPTFSPATLTVHLLENCPPGFSVLQVTATDEDSGLNGELVYRIEAGAQDRFLIHLVTGVIRVGNATIDREEQESYRLTVVATDRGTVPLSGTAIVTILIDDINDSRPEFLNPIQTVSVLESAEPGTVIANITAIDHDLNPKLEYHIVGIVAKDDTDRLVPNQEDAFAVNINTGSVMVKSPMNRELVATYEVTLSVIDNASDLPERSVSVPNAKLTVNVLDVNDNTPQFKPFGITYYMERILEGATPGTTLIAVAAVDPDKGLNGLVTYTLLDLVPPGYVQLEDSSAGKVIANRTVDYEEVHWLNFTVRASDNGSPPRAAEIPVYLEIVDINDNNPIFDQPSYQEAVFEDVPVGTIILTVTATDADSGNFALIEYSLGDGESKFAINPTTGDIYVLSSLDREKKDHYILTALAKDNPGDVASNRRENSVQVVIQVLDVNDCRPQFSKPQFSTSVYENEPAGTSVITMMATDQDEGPNGELTYSLEGPGVEAFHVDMDSGLVTTQRPLQSYEKFSLTVVATDGGEPPLWGTTMLLVEVIDVNDNRPVFVRPPNGTILHIREEIPLRSNVYEVYATDKDEGLNGAVRYSFLKTAGNRDWEFFIIDPISGLIQTAQRLDRESQAVYSLILVASDLGQPVPYETMQPLQVALEDIDDNEPLFVRPPKGSPQYQLLTVPEHSPRGTLVGNVTGAVDADEGPNAIVYYFIAAGNEEKNFHLQPDGCLLVLRDLDREREAIFSFIVKASSNRSWTPPRGPSPTLDLVADLTLQEVRVVLEDINDQPPRFTKAEYTAGVATDAKVGSELIQVLALDADIGNNSLVFYSILAIHYFRALANDSEDVGQVFTMGSMDGILRTFDLFMAYSPGYFVVDIVARDLAGHNDTAIIGIYILRDDQRVKIVINEIPDRVRGFEEEFIHLLSNITGAIVNTDNVQFHVDKKGRVNFAQTELLIHVVNRDTNRILDVDRVIQMIDENKEQLRNLFRNYNVLDVQPAISVRLPDDMSALQMAIIVLAILLFLAAMLFVLMNWYYRTVHKRKLKAIVAGSAGNRGFIDIMDMPNTNKYSFDGANPVWLDPFCRNLELAAQAEHEDDLPENLSEIADLWNSPTRTHGTFGREPAAVKPDDDRYLRAAIQEYDNIAKLGQIIREGPIKGSLLKVVLEDYLRLKKLFAQRMVQKASSCHSSISELIQTELDEEPGDHSPGQGSLRFRHKPPVELKGPDGIHVVHGSTGTLLATDLNSLPEEDQKGLGRSLETLTAAEATAFERNARTESAKSTPLHKLRDVIMETPLEITEL

SEQ ID NO: 1461 - protein, 15 aa, Homo sapiens
MTMRQIVSFFFFSFY

SEQ ID NO: 1462 - protein, 13 aa, Homo sapiens
MTFLGHLWIYREN

SEQ ID NO: 1463 - protein, 92 aa, Homo sapiens
IKNRGGCLLLLVLHPSRHSAVSCLGVAAAMARKALPPTHLGQSWFCSCCRDTELAISALRARTATGSPGSCRCTAGPLPCASALESCCCRVT

SEQ ID NO: 1464 - protein, 27 aa, Homo sapiens
LSRTGRLSGPGVLVSSPSPTQSMLQLP

SEQ ID NO: 1465 - protein, 14 aa, Homo sapiens
IHSIVCVVLVLCPN

SEQ ID NO: 1466 - protein, 46 aa, Homo sapiens
RIATVSIAAAVAPLTLFLYRGDGGLSSRRRADAAAGAQETIYPACC

SEQ ID NO: 1467 - protein, 22 aa, Homo sapiens
ILSDGSLWMKWKNSKGNKLKKT

SEQ ID NO: 1468 - protein, 82 aa, Homo sapiens
LERARSQRLGGREGSAARRAPASERASERRGGGRERGAARESRSGSGGGGGGGEARRPLPCKPCLPKAKARRCPRMGRLGKS

SEQ ID NO: 1469 - protein, 42 aa, Homo sapiens
IIWGDFIFRSLYKGFLMSITCWMRLCSSPPLSEWSVSINWTP

SEQ ID NO: 1470 - protein, 12 aa, Homo sapiens
MSIVVMIFLSTL

SEQ ID NO: 1471 - protein, 9 aa, Homo sapiens
ILSLQSSRL

SEQ ID NO: 1472 - protein, 1112 aa, Homo sapiens
ISSKDTMRLPGAMPALALKGELLLLSLLLLLEPQISQGLVVTPPGPELVLNVSSTFVLTCSGSAPVVWERMSQEPPQEMAKAQDGTFSSVLTLTNLTGLDTGEYFCTHNDSRGLETDERKRLYIFVPDPTVGFLPNDAEELFIFLTEITEITIPCRVTDPQLVVTLHEKKGDVALPVPYDHQRGFSGIFEDRSYICKTTIGDREVDSDAYYVYRLQVSSINVSVNAVQTVVRQGENITLMCIVIGNEVVNFEWTYPRKESGRLVEPVTDFLLDMPYHIRSILHIPSAELEDSGTYTCNVTESVNDHQDEKAINITVVESGYVRLLGEVGTLQFAELHRSRTLQVVFEAYPPPTVLWFKDNRTLGDSSAGEIALSTRNVSETRYVSELTLVRVKVAEAGHYTMRAFHEDAEVQLSFQLQINVPVRVLELSESHPDSGEQTVRCRGRGMPQPNIIWSACRDLKRCPRELPPTLLGNSSEEESQLETNVTYWEEEQEFEVVSTLRLQHVDRPLSVRCTLRNAVGQDTQEVIVVPHSLPFKVVVISAILALVVLTIISLIILIMLWQKKPRYEIRWKVIESVSSDGHEYIYVDPMQLPYDSTWELPRDQLVLGRTLGSGAFGQVVEATAHGLSHSQATMKVAVKMLKSTARSSEKQALMSELKIMSHLGPHLNVVNLLGACTKGGPIYIITEYCRYGDLVDYLHRNKHTFLQHHSDKRRPPSAELYSNALPVGLPLPSHVSLTGESDGGYMDMSKDESVDYVPMLDMKGDVKYADIESSNYMAPYDNYVPSAPERTCRATLINESPVLSYMDLVGFSYQVANGMEFLASKNCVHRDLAARNVLICEGKLVKICDFGLARDIMRDSNYISKGSTFLPLKWMAPESIFNSLYTTLSDVWSFGILLWEIFTLGGTPYPELPMNEQFYNAIKRGYRMAQPAHASDEIYEIMQKCWEEKFEIRPPFSQLVLLLERLLGEGYKKKYQQVDEEFLRSDHPAILRSQARLPGFHGLRSPLDTSSVLYTAVQPNEGDNDYIIPLPDPKPEVADEGPLEGSPSLASSTLNEVNTSSTISCDSPLEPQDEPEPEPQLELQVEPEPELEQLPDSGCPAPRAEAEDSFL

SEQ ID NO: 1473 - protein, 420 aa, Homo sapiens
TMSCAGRAGPARLAALALLTCSLWPARADNASQEYYTALINVTVQEPGRGAPLTFRIDRGRYGLDSPKAEVRGQVLAPLPLHGVADHLGCDPQTRFFVPPNIKQWIALLQRGNCTFKEKISRAAFHNAVAVVIYNNKSKEEPVTMTHPGTGDIIAVMITELRGKDILSYLEKNISVQMTIAVGTRMPPKNFSRGSLVFVSISFIVLMIISSAWLIFYFIQKIRYTNARDRNQRRLGDAAKKAISKLTTRTVKKGDKETDPDFDHCAVCIESYKQNDVVRILPCKHVFHKSCVDPWLSEHCTCPMCKLNILKALGIVPNLPCTDNVAFDMERLTRTQAVNRRSALGDLAGDNSLGLEPLRTSGISPLPQDGELTPRTGEINIAVTKEWFIIASFGLLSALTLCYMIIRATASLNANEVEWF

SEQ ID NO: 1474 - protein, 806 aa, Homo sapiens
TGPDRERSRSGSRSRAAGAAGAAGAGEAGRAGLHGASGVRLSSAGNSGGVGRIGPRHLLAMGDVLSTHLDDARRQHIAEKTGKILTEFLQFYEDQYGVALFNSMRHEIEGTGLPQAQLLWRKVPLDERIVFSGNLFQHQEDSKKWRNRFSLVPHNYGLVLYENKAAYERQVPPRAVINSAGYKILTSVDQYLELIGNSLPGTTAKSGSAPILKCPTQFPLILWHPYARHYYFCMMTEAEQDKWQAVLQDCIRHCNNGIPEDSKVEGPAFTDAIRMYRQSKELYGTWEMLCGNEVQILSNLVMEELGPELKAELGPRLKGKPQERQRQWIQISDAVYHMVYEQAKARFEEVLSKVQQVQPAMQAVIRTDMDQIITSKEHLASKIRAFILPKAEVCVRNHVQPYIPSILEALMVPTSQGFTEVRDVFFKEVTDMNLNVINEGGIDKLGEYMEKLSRLAYHPLKMQSCYEKMESLRLDGLQQRFDVSSTSVFKQRAQIHMREQMDNAVYTFETLLHQELGKGPTKEELCKSIQRVLERVLKKYDYDSSSVRKRFFREALLQISIPFLLKKLAPTCKSELPRFQELIFEDFARFILVENTYEEVVLQTVMKDILQAVKEAAVQRKHNLYRDSMVMHNSDPNLHLLAEGAPIDWGEEYSNSGGGGSPSPSTPESATLSEKRRRAKQVVSVVQDEEVGLPFEASPESPPPASPDGVTEIRGLLAQGLRPESPPPAGPLLNGAPAGESPQPKAAPEASSPPASPLQHLLPGKAVDLGPPKPSDQETGEQVSSPSSHPALHTTTEDSAGVQTEF

SEQ ID NO: 1475 - protein, 28 aa, Homo sapiens
KSFLIFLIHHLMFLRDYRCLMIPVTREE

SEQ ID NO: 1476 - protein, 644 aa, Homo sapiens
TGQTNQPRVGSATMPRYGASLRQSCPRSGREQGQDGTAGAPGLLWMGLVLALALALALALALSDSRVLWAPAEAHPLSPQGHPARLHRIVPRLRDVFGWGNLTCPICKGLFTAINLGLKKEPNVARVGSVAIKLCNLLKIAPPAVCQSIVHLFEDDMVEVWRRSVLSPSEACGLLLGSTCGHWDIFSSWNISLPTVPKPPPKPPSPPAPGAPVSRILFLTDLHWDHDYLEGTDPDCADPLCCRRGSGLPPASRPGAGYWGEYSKCDLPLRTLESLLSGLGPAGPFDMVYWTGDIPAHDVWHQTRQDQLRALTTVTALVRKFLGPVPVYPAVGNHESTPVNSFPPPFIEGNHSSRWLYEAMAKAWEPWLPAEALRTLRIGGFYALSPYPGLRLISLNMNFCSRENFWLLINSTDPAGQLQWLVGELQAAEDRGDKVHIIGHIPPGHCLKSWSWNYYRIVARYENTLAAQFFGHTHVDEFEVFYDEETLSRPLAVAFLAPSATTYIGLNPGYRVYQIDGNYSGSSHVVLDHETYILNLTQANIPGAIPHWQLLYRARETYGLPNTLPTAWHNLVYRMRGDMQLFQTFWFLYHKGHPPSEPCGTPCRLATLCAQLSARADSPALCRHLMPDGSLPEAQSLWPRPLFC

SEQ ID NO: 1477 - protein, 51 aa, Homo sapiens
IVYVWVSLSPPLVLILTCRNTQQTHVCEGPEKPDPVRKNSLFTLNKPNIPF

SEQ ID NO: 1478 - protein, 19 aa, Homo sapiens
LLFESILRGTERIRMLNSV

SEQ ID NO: 1479 - protein, 17 aa, Homo sapiens
RREMDMAHCSTILLLFL

SEQ ID NO: 1480 - protein, 7 aa, Homo sapiens
LPIPLHR

SEQ ID NO: 1481 - protein, 13 aa, Homo sapiens
MMQVLPLQIILPT

SEQ ID NO: 1482 - protein, 22 aa, Homo sapiens
VRFFLLCVLILAIFLNVGNSTA

SEQ ID NO: 1483 - protein, 22 aa, Homo sapiens
RGTSILLWMMTILNPQMQNNWI

SEQ ID NO: 1484 - protein, 52 aa, Homo sapiens
LIPGTRLREKACCVEDKAAREVDTGWAGDLTGLSLLLAGHGGFGGRCKVYCG

SEQ ID NO: 1485 - protein, 40 aa, Homo sapiens
LMTVVTALLLIILQTRGCSQFGKAVGPAASAGTLDLSGWR

SEQ ID NO: 1486 - protein, 17 aa, Homo sapiens
RNFRHMVLMRIQCLFAI

SEQ ID NO: 1487 - protein, 22 aa, Homo sapiens
IERTSLKIWLLLLVVQCLEKRD

SEQ ID NO: 1488 - protein, 2634 aa, Homo sapiens
RMPVTEKDLAEDAPWKKIQQNTFTRWCNEHLKCVNKRIGNLQTDLSDGLRLIALLEVLSQKRMYRKYHQRPTFRQMQLENVSVALEFLDRESIKLVSIDSKAIVDGNLKLILGLVWTLILHYSISMPVWEDEGDDDAKKQTPKQRLLGWIQNKIPYLPITNFNQNWQDGKALGALVDSCAPGLCPDWESWDPQKPVDNAREAMQQADDWLGVPQVITPEEIIHPDVDEHSVMTYLSQFPKAKLKPGAPLKPKLNPKKARAYGRGIEPTGNMVKQPAKFTVDTISAGQGDVMVFVEDPEGNKEEAQVTPDSDKNKTYSVEYLPKVTGLHKVTVLFAGQHISKSPFEVSVDKAQGDASKVTAKGPGLEAVGNIANKPTYFDIYTAGAGVGDIGVEVEDPQGKNTVELLVEDKGNQVYRCVYKPMQPGPHVVKIFFAGDTIPKSPFVVQVGEACNPNACRASGRGLQPKGVRIRETTDFKVDTKAAGSGELGVTMKGPKGLEELVKQKDFLDGVYAFEYYPSTPGRYSIAITWGGHHIPKSPFEVQVGPEAGMQKVRAWGPGLHGGIVGRSADFVVESIGSEVGSLGFAIEGPSQAKIEYNDQNDGSCDVKYWPKEPGEYAVHIMCDDEDIKDSPYMAFIHPATGGYNPDLVRAYGPGLEKSGCIVNNLAEFTVDPKDAGKAPLKIFAQDGEGQRIDIQMKNRMDGTYACSYTPVKAIKHTIAVVWGGVNIPHSPYRVNIGQGSHPQKVKVFGPGVERSGLKANEPTHFTVDCTEAGEGDVSVGIKCDARVLSEDEEDVDFDIIHNANDTFTVKYVPPAAGRYTIKVLFASQEIPASPFRVKVDPSHDASKVKAEGPGLSKAGVENGKPTHFTVYTKGAGKAPLNVQFNSPLPGDAVKDLDIIDNYDYSHTVKYTPTQQGNMQVLVTYGGDPIPKSPFTVGVAAPLDLSKIKLNGLENRVEVGKDQEFTVDTRGAGGQGKLDVTILSPSRKVVPCLVTPVTGRENSTAKFIPREEGLYAVDVTYDGHPVPGSPYTVEASLPPDPSKVKAHGPGLEGGLVGKPAEFTIDTKGAGTGGLGLTVEGPCEAKIECSDNGDGTCSVSYLPTKPGEYFVNILFEEVHIPGSPFKADIEMPFDPSKVVASGPGLEHGKVGEAGLLSVDCSEAGPGALGLEAVSDSGTKAEVSIQNNKDGTYAVTYVPLTAGMYTLTMKYGGELVPHFPARVKVEPAVDTSRIKVFGPGIEGKDVFREATTDFTVDSRPLTQVGGDHIKAHIANPSGASTECFVTDNADGTYQVEYTPFEKGLHVVEVTYDDVPIPNSPFKVAVTEGCQPSRVQAQGPGLKEAFTNKPNVFTVVTRGAGIGGLGITVEGPSESKINCRDNKDGSCSAEYIPFAPGDYDVNITYGGAHIPGSPFRVPVKDVVDPSKVKIAGPGLGSGVRARVLQSFTVDSSKAGLAPLEVRVLGPRADDTDSQSWRSPLKALSEFFKGDPKGDFNKTGLVEPVNVVDNGDGTHTVTYTPSQEGPYMVSVKYADEEIPRSPFKVKVLPTYDASKVTASGPGLSSYGVPASLPVDFAIDARDAGEGLLAVQITDQEGKPKRAIVHDNKDGTYAVTYIPDKTGRYMIGVTYGGDDIPLSPYRIRATQTGDASKCLATGPGIASTVKTGEEVGFVVDAKTAGKGKVTCTVLTPDGTEAEADVIENEDGTYDIFYTAAKPGTYVIYVRFGGVDIPNSPFTVMATDGEVTAVEEAPVNACPPGFRPWVTEEAYVPVSDMNGLGFKPFDLVIPFAVRKGEITGEVHMPSGKTATPEIVDNKDGTVTVRYAPTEVGLHEMHIKYMGSHIPESPLQFYVNYPNSGSVSAYGPGLVYGVANKTATFTIVTEDAGEGGLDLAIEGPSKAEISCIDNKDGTCTVTYLPTLPGDYSILVKYNDKHIPGSPFTAKITDDSRRCSQVKLGSAADFLLDISETDLSSLTASIKAPSGRDEPCLLKRLPNNHIGISFIPREVGEHLVSIKKNGNHVANSPVSIMVVQSEIGDARRAKVYGRGLSEGRTFEMSDFIVDTRDAGYGGISLAVEGPSKVDIQTEDLEDGTCKVSYFPTVPGVYIVSTKFADEHVPGSPFTVKISGEGRVKESITRTSRAPSVATVGSICDLNLKIPEINSSDMSAHVTSPSGRVTEAEIVPMGKNSHCVRFVPQEMGVHTVSVKYRGQHVTGSPFQFTVGPLGEGGAHKVRAGGPGLERGEAGVPAEFSIWTREAGAGGLSIAVEGPSKAEITFDDHKNGSCGVSYIAQEPGNYEVSIKFNDEHIPESPYLVPVIAPSDDARRLTVMSLQESGLKVNQPASFAIRLNGAKGKIDAKVHSPSGAVEECHVSELEPDKYAVRFIPHENGVHTIDVKFNGSHVVGSPFKVRVGEPGQAGNPALVSAYGTGLEGGTTGIQSEFFINTTRAGPGTLSVTIEGPSKVKMDCQETPEGYKVMYTPMAPGNYLISVKYGGPNHIVGSPFKAKVTGQRLVSPGSANETSSILVESVTRSSTETCYSAIPKASSDASKVTSKGAGLSKAFVGQKSSFLVDCSKAGSNMLLIGVHGPTTPCEEVSMKHVGNQQYNVTYVVKERGDYVLAVKWGEEHIPGSPFHVTVP

SEQ ID NO: 1489 - protein, 43 aa, Homo sapiens
MDECTHSSWVSWLLFGVCYTPVLCPVSSEKFHVCDKLGGRVAS

SEQ ID NO: 1490 - protein, 15 aa, Homo sapiens
IALAALALGASIMNC

SEQ ID NO: 1491 - protein, 24 aa, Homo sapiens
VKNLVVVLLFIALQALGELQYLLP

SEQ ID NO: 1492 - protein, 23 aa, Homo sapiens
MLFLKVCLCLFKSYSMASWEALR

SEQ ID NO: 1493 - protein, 14 aa, Homo sapiens
KKMILVILEWMIVR

SEQ ID NO: 1494 - protein, 25 aa, Homo sapiens
KGALSIRVEKSTRFLPLKQKPWHLA

SEQ ID NO: 1495 - protein, 8 aa, Homo sapiens
LLFGLFLA

SEQ ID NO: 1496 - protein, 31 aa, Homo sapiens
IGLSRGRHVAFRGAFMGLSGMGFLFLIVNSR

SEQ ID NO: 1497 - protein, 12 aa, Homo sapiens
IGLLVWTYYMDQ

SEQ ID NO: 1498 - protein, 695 aa, Homo sapiens
RKMTPQSLLQTTLFLLSLLFLVQGAHGRGHREDFRFCSQRNQTHRSSLHYKPTPDLRISIENSEEALTVHAPFPAAHPASRSFPDPRGLYHFCLYWNRHAGRLHLLYGKRDFLLSDKASSLLCFQHQEESLAQGPPLLATSVTSWWSPQNISLPSAASFTFSFHSPPHTAAHNASVDMCELKRDLQLLSQFLKHPQKASRRPSAAPASQQLQSLESKLTSVRFMGDMVSFEEDRINATVWKLQPTAGLQDLHIHSRQEEEQSEIMEYSVLLPRTLFQRTKGRSGEAEKRLLLVDFSSQALFQDKNSSQVLGEKVLGIVVQNTKVANLTEPVVLTFQHQLQPKNVTLQCVFWVEDPTLSSPGHWSSAGCETVRRETQTSCFCNHLTYFAVLMVSSVEVDAVHKHYLSLLSYVGCVVSALACLVTIAAYLCSRVPLPCRRKPRDYTIKVHMNLLLAVFLLDTSFLLSEPVALTGSEAGCRASAIFLHFSLLTCLSWMGLEGYNLYRLVVEVFGTYVPGYLLKLSAMGWGFPIFLVTLVALVDVDNYGPIILAVHRTPEGVIYPSMCWIRDSLVSYITNLGLFSLVFLFNMAMLATMVVQILRLRPHTQKWSHVLTLLGLSLVLGLPWALIFFSFASGTFQLVVLYLFSIITSFQGFLIFIWYWSMRLQARGGPSPLKSNSDSARLPISSGSTSSSRI

SEQ ID NO: 1499 - protein, 36 aa, Homo sapiens
RYRMRRKTRNLAFLWAITWASPSQLTTRSKLENEIP

SEQ ID NO: 1500 - protein, 22 aa, Homo sapiens
RVPAMPKKLRSGLLGCLELVGL

SEQ ID NO: 1501 - protein, 18 aa, Homo sapiens
IKNRGGCLLLLVLVRRQM

SEQ ID NO: 1502 - protein, 13 aa, Homo sapiens
VALIIANIFSLGY

SEQ ID NO: 1503 - protein, 16 aa, Homo sapiens
IWLLILAGISGLSAGP

SEQ ID NO: 1504 - protein, 672 aa, Homo sapiens
LLPAAPESDSGGGPGGGSGGGGASMSWLFGVNKGPKGEGAGPPPPLPPAQPGAEGGGDRGLGDRPAPKDKWSNFDPTGLERAAKAARELEHSRYAKEALNLAQMQEQTLQLEQQSKLKEYEAAVEQLKSEQIRAQAEERRKTLSEETRQHQARAQYQDKLARQRYEDQLKQQQLLNEENLRKQEESVQKQEAMRRATVEREMELRHKNEMLRVETEARARAKAERENADIIREQIRLKASEHRQTVLESIRTAGTLFGEGFRAFVTDRDKVTATVAGLTLLAVGVYSAKNATAVTGRFIEARLGKPSLVRETSRITVLEALRHPIQVSRRLLSRPQDVLEGVVLSPSLEARVRDIAIATRNTKKNRGLYRHILLYGPPGTGKTLFAKKLALHSGMDYAIMTGGDVAPMGREGVTAMHKLFDWANTSRRGLLLFMDEADAFLRKRATEEISKDLRATLNAFLYHMGQHSNKFMLVLASNLPEQFDCAINSRIDVMVHFDLPQQEERERLVRLHFDNCVLKPATEGKRRLKLAQFDYGRKCSEVARLTEGMSGREIAQLAVSWQATAYASKDGVLTEAMMDACVQDAVQQYRQKMRWLKAEGPGRGVEHPLSGVQGETLTSWSLATDPSYPCLAGPCTFRICSWMGTGLCPGPLSPRMSCGGGRPFCPPGHPLL

SEQ ID NO: 1505 - protein, 610 aa, Homo sapiens
LLPAARESDSGGGPGGGSGGGGASMSWLFGINKGPKGEGAGPPPPLPPAQPGAEGGGDRGLGDRPAPKDKWSNFDPTGLERAAKAARELEHSRYAKDALNLAQMQEQTLQLEQQSKLKEYEAAVEQLKSEQIRAQAEERRKTLSEETRQHQARAQYQDKLARQRYEDQLKQQQLLNEENLRKQEESVQKQEAMRRATVEREMELRHKNEMLRVEAEARARAKAERENADIIREQIRLKAAEHRQTVLESIRTAGTLFGEGFRAFVTDWDKVTATVAGLTLLAVGVYSAKNATLVAGRFIEARLGKPSLVRETSRITVLEALRHPIQVSRRLLSRPQDALEGVVLSPSLEARVRDIAIATRNTKKNRSLYRNILMYGPPGTGKTLFAKKLALHSGMDYAIMTGGDVAPMGREGVTAMHKLFDWANTSRRGLLLFVDEADAFLRKRATEKISEDLRATLNAFLYRTGQHSNKFMLVLASNQPEQFDWAINDRINEMVHFDLPGQEERERLVRMYFDKYVLKPATEGKQRLKLAQFDYGRKCSEVARLTEGMSGREIAQLAVSWQATAYASEDGVLTEAMMDTRVQDAVQQHQQKMCWLKAEGPGRGDEPSPS

SEQ ID NO: 1506 - protein, 658 aa, Homo sapiens
LLPAARESDSGGGPGGGSGGGGASMSWLFGINKGPKGEGAGPPPPLPPAQPGAEGGGDRGLGDRPAPKDKWSNFDPTGLERAAKAARELEHSRYAKDALNLAQMQEQTLQLEQQSKLKMRLEALSLLHTLVWAWSLCRAGAVQTQERLSGSASPEQVPAGECCALQEYEAAVEQLKSEQIRAQAEERRKTLSEETRQHQARAQYQDKLARQRYEDQLKQQQLLNEENLRKQEESVQKQEAMRRATVEREMELRHKNEMLRVEAEARARAKAERENADIIREQIRLKAAEHRQTVLESIRTAGTLFGEGFRAFVTDWDKVTATVAGLTLLAVGVYSAKNATLVAGRFIEARLGKPSLVRETSRITVLEALRHPIQVSRRLLSRPQDALEGVVLSPSLEARVRDIAIATRNTKKNRSLYRNILMYGPPGTGKTLFAKKLALHSGMDYAIMTGGDVAPMGREGVTAMHKLFDWANTSRRGLLLFVDEADAFLRKRATEKISEDLRATLNAFLYRTGQHSNKFMLVLASNQPEQFDWAINDRINEMVHFDLPGQEERERLVRMYFDKYVLKPATEGKQRLKLAQFDYGRKCSEVARLTEGMSGREIAQLAVSWQATAYASEDGVLTEAMMDTRVQDAVQQHQQKMCWLKAEGPGRGDEPSPS

SEQ ID NO: 1507 - protein, 26 aa, Homo sapiens
RTWSLEEYLVCFSSCLACLCSSSCCC

SEQ ID NO: 1508 - protein, 42 aa, Homo sapiens
LGHMPRPWRLSHASCVTMLALMPQTFSTSCGLGMPRGVHGME

SEQ ID NO: 1509 - protein, 12 aa, Homo sapiens
LETAHNFLLLLF

SEQ ID NO: 1510 - protein, 37 aa, Homo sapiens
VWELARRIRQSLSRLLLTQAWCISWMISAPCQLCLSS

SEQ ID NO: 1511 - protein, 18 aa, Homo sapiens
KMAWKIIGNTKLTNRSII

SEQ ID NO: 1512 - protein, 18 aa, Homo sapiens
MIPLPKNKKILIRKFKKS

SEQ ID NO: 1513 - protein, 28 aa, Homo sapiens
LVPLTFFFLTDFLIPQSHRHANVQEVQM

SEQ ID NO: 1514 - protein, 40 aa, Homo sapiens
LGLVFIVLVSLILNKHSLKELLIPRSKFSLSKVDFRLLKE

SEQ ID NO: 1515 - protein, 265 aa, Homo sapiens
ISLRMTILGTTFGMVFSLLQVVSGESGYAQNGDLEDAELDDYSFSCYSQLEVNGSQHSLTCAFEDPDVNITNLEFEICGALVEVKCLNFRKLQEIYFIETKKFLLIGKSNICVKVGEKSLTCKKIDLTTIVKPEAPFDLSVVYREGANDFVVTFNTSHLQKKYVKVLMHDVAYRQEKDENKWTHVNLSSTKLTLLQRKLQPAAMYEIKVRSIPDHYFKGFWSEWSPSYYFRTPEINNSSGLSLSYGPVSPIIRRLWNIFVRNQEK

SEQ ID NO: 1516 - protein, 463 aa, Homo sapiens
ISLRMTILGTTFGMVFSLLQVVSGESGYAQNGDLEDAELDDYSFSCYSQLEVNGSQHSLTCAFEDPDVNITNLEFEICGALVEVKCLNFRKLQEIYFIETKKFLLIGKSNICVKVGEKSLTCKKIDLTTIVKPEAPFDLSVVYREGANDFVVTFNTSHLQKKYVKVLMHDVAYRQEKDENKWTHVNLSSTKLTLLQRKLQPAAMYEIKVRSIPDHYFKGFWSEWSPSYYFRTPEINNSSGEMDPILLTISILSFFSVALLVILACVLWKKRIKPIVWPSLPDHKKTLEHLCKKPRKNLNVSFNPESFLDCQIHRVDDIQARDEVEGFLQDTFPQQLEESEKQRLGGDVQSPNCPSEDVVITPESFGRDSSLTCLAGNVSACDAPILSSSRSLDCRESGKNGPHVYQDLLLSLGTTNSTLPPPFSLQSGILTLNPVAQGQPILTSLGSNQEEAYVTMSSFYQNQ

SEQ ID NO: 1517 - protein, 8 aa, Homo sapiens
ILSLQSSR

SEQ ID NO: 1518 - protein, 16 aa, Homo sapiens
LILQRLFIMKVKKILP

SEQ ID NO: 1519 - protein, 123 aa, Homo sapiens
MSILKIHAREIFDSRGNPTVEVDLFTSKGLFRAAVPSGASTGIYEALELRDNDKTRYMGKERLPGPGAFLFMEELILRAVEAYWIPCHAREQSMHDIILTCPLPHPTFGSRWNCIRRMRHFEP

SEQ ID NO: 1520 - protein, 29 aa, Homo sapiens
LRCFISSLMTGLWTGGAWELSCMRCCMAW

SEQ ID NO: 1521 - protein, 66 aa, Homo sapiens
LLLDVSHRRVCCLPAGLAQQQPENLLQVSQSDQSQFRSCYPGAGWGNAQRSVHILSGSPSSGHTGR

SEQ ID NO: 1522 - protein, 322 aa, Homo sapiens
LRRRAACSPGPAPRAARPPAMEPGPDGPAASGPAAIREGWFRETCSLWPGQALSLQVEQLLHHRRSRYQDILVFRSKTYGNVLVLDGVIQCTERDEFSYQEMIANLPLCSHPNPRKVLIIGGGDGGVLREVVKHPSVESVVQCEIDEDVIQVSKKFLPGMAIGYSSSKLTLHVGDGFEFMKQNQDAFDVIITDSSDPMGPAESLFKESYYQLMKTALKEDGVLCCQGECQWLHLDLIKEMRQFCQSLFPVVAYAYCTIPTYPSGQIGFMLCSKNPSTNFQEPVQPLTQQQVAQMQLKYYNSDVHRAAFVLPEFARKALNDVS

SEQ ID NO: 1523 - protein, 34 aa, Homo sapiens
ISLGFGYTLIDLLHCLQAQLLICVQDEWDGRKYL

SEQ ID NO: 1524 - protein, 1465 aa, Homo sapiens
KMSGMGENTSDPSRAETRKRKECPDQLGPSPKRNTEKRNREQENKYIEELAELIFANFNDIDNFNFKPDKCAILKETVKQIRQIKEQEKAAAANIDEVQKSDVSSTGQGVIDKDALGPMMLEALDGFFFVVNLEGNVVFVSENVTQYLRYNQEELMNKSVYSILHVGDHTEFVKNLLPKSIVNGGSWSGEPPRRNSHTFNCRMLVKPLPDSEEEGHDNQEAHQKYETMQCFAVSQPKSIKEEGEDLQSCLICVARRVPMKERPVLPSSESFTTRQDLQGKITSLDTSTMRAAMKPGWEDLVRRCIQKFHAQHEGESVSYAKRHHHEVLRQGLAFSQIYRFSLSDGTLVAAQTKSKLIRSQTTNEPQLVISLHMLHREQNVCVMNPDLTGQTMGKPLNPISSNSPAHQALCSGNPGQDMTLSSNINFPINGPKEQMGMPMGRFGGSGGMNHVSGMQATTPQGSNYALKMNSPSQSSPGMNPGQPTSMLSPRHRMSPGVAGSPRIPPSQFSPAGSLHSPVGVCSSTGNSHSYTNSSLNALQALSEGHGVSLGSSLASPDLKMGNLQNSPVNMNPPPLSKMGSLDSKDCFGLYGEPSEGTTGQAESSCHPGEQKETNDPNLPPAVSSERADGQSRLHDSKGQTKLLQLLTTKSDQMEPSPLASSLSDTNKDSTGSLPGSGSTHGTSLKEKHKILHRLLQDSSSPVDLAKLTAEATGKDLSQESSSTAPGSEVTIKQEPVSPKKKENALLRYLLDKDDTKDIGLPEITPKLERLDSKTDPASNTKLIAMKTEKEEMSFEPGDQPGSELDNLEEILDDLQNSQLPQLFPDTRPGAPAGSVDKQAIINDLMQLTAENSPVTPVGAQKTALRISQSTFNNPRPGQLGRLLPNQNLPLDITLQSPTGAGPFPPIRNSSPYSVIPQPGMMGNQGMIGNQGNLGNSSTGMIGNSASRPTMPSGEWAPQSSAVRVTCAATTSAMNRPVQGGMIRNPAASIPMRPSSQPGQRQTLQSQVMNIGPSELEMNMGGPQYSQQQAPPNQTAPWPESILPIDQASFASQNRQPFGSSPDDLLCPHPAAESPSDEGALLDQLYLALRNFDGLEEIDRALGIPELVSQSQAVDPEQFSSQDSNIMLEQKAPVFPQQYASQAQMAQGSYSPMQDPNFHTMGQRPSYATLRMQPRPGLRPTGLVQNQPNQLRLQLQHRLQAQQNRQPLMNQISNVSNVNLTLRPGVPTQAPINAQMLAQRQREILNQHLRQRQMHQQQQVQQRTLMMRGQGLNMTPSMVAPSGMPATMSNPRIPQANAQQFPFPPNYGISQQPDPGFTGATTPQSPLMSPRMAHTQSPMMQQSQANPAYQAPSDINGWAQGNMGGNSMFSQQSPPHFGQQANTSMYSNNMNINVSMATNTGGMSSMNQMTGQISMTSVTSVPTSGLSSMGPEQVNDPALRGGNLFPNQLPGMDMIKQEGDTTRKYC

SEQ ID NO: 1525 - protein, 642 aa, Homo sapiens
VAAAGVCWSLKSTRAAENRRDRTWAPRASPASQVGAGRQATSRPAPGMRVLLAALGLLFLGALRAFPQDRPFEDTCHGNPSHYYDKAVRRCCYRCPMGLFPTQQCPQRPTDCRKQCEPDYYLDEADRCTACVTCSRDDLVEKTPCAWNSSRVCECRPGMFCSTSAVNSCARCFFHSVCPAGMIVKFPGTAQKNTVCEPASPGVSPACASPENCKEPSSGTIPQAKPTPVSPATSSASTMPVRGGTRLAQEAASKLTRAPDSPSSVGRPSSDPGLSPTQPCPEGSGDCRKQCEPDYYLDEAGRCTACVSCSRDDLVEKTPCAWNSSRTCECRPGMICATSATNSCARCVPYPICAAETVTKPQDMAEKDTTFEAPPLGTQPDCNPTPENGEAPASTSPTQSLLVDSQASKTLPIPTSAPVALSSTGKPVLDAGPVLFWVILVLVVVVGSSAFLLCHRRACRKRIRQKLHLCYPVQTSQPKLELVDSRPRRSSTQLRSGASVTEPVAEERGLMSQPLMETCHSVGAAYLESLPLQDASPAGGPSSPRDLPEPRVSTEHTNNKIEKIYIMKADTVIVGTVKAELPEGRGLAGPAEPELEEELEADHTPHYPEQETEPPLGSCSDVMLSVEEEGKEDPLPTAASGK

SEQ ID NO: 1526 - protein, 36 aa, Homo sapiens
LFVCLFLPLGSAPALASRKPQHPFLQRGFLERRDAA

SEQ ID NO: 1527 - protein, 37 aa, Homo sapiens
ILSLLVSTWILHLLRVIYTKSYRGLCFVTLEEFFTET

SEQ ID NO: 1528 - protein, 19 aa, Homo sapiens
IYLHFMIFQFMQIRMCFTW

SEQ ID NO: 1529 - protein, 10 aa, Homo sapiens
MGLLLMSLYG

SEQ ID NO: 1530 - protein, 15 aa, Homo sapiens
VHGPMIAIRAILCWL

SEQ ID NO: 1531 - protein, 22 aa, Homo sapiens
LFLGSLGMSACLRLLLVGWKER

SEQ ID NO: 1532 - protein, 26 aa, Homo sapiens
RLTLMCLDPVWTLMLLIWILRDQKES

SEQ ID NO: 1533 - protein, 19 aa, Homo sapiens
MPRVAKLGFLVVLELARLY

SEQ ID NO: 1534 - protein, 25 aa, Homo sapiens
IFQWTVLALVDISCTWPAPFLQRIC

SEQ ID NO: 1535 - protein, 29 aa, Homo sapiens
MGVIRMYFLIILVWEQIERDAWKTQKTLE

SEQ ID NO: 1536 - protein, 25 aa, Homo sapiens
LLLSNQYRWKSWLQRVLLPHLRMSP

SEQ ID NO: 1537 - protein, 21 aa, Homo sapiens
RNFQSPGQFPGWLKALMSALM

SEQ ID NO: 1538 - protein, 1374 aa, Homo sapiens
ISSQIKGMKSGSGGGSPTSLWGLLFLSAALSLWPTSGEICGPGIDIRNDYQQLKRLENCTVIEGYLHILLISKAEDYRSYRFPKLTVITEYLLLFRVAGLESLGDLFPNLTVIRGWKLFYNYALVIFEMTNLKDIGLYNLRNITRGAIRIEKNADLCYLSTVDWSLILDAVSNNYIVGNKPPKECGDLCPGTMEEKPMCEKTTINNEYNYRCWTTNRCQKMCPSTCGKRACTENNECCHPECLGSCSAPDNDTACVACRHYYYAGVCVPACPPNTYRFEGWRCVDRDFCANILSAESSDSEGFVIHDGECMQECPSGFIRNGSQSMYCIPCEGPCPKVCEEEKKTKTIDSVTSAQMLQGCTIFKGNLLINIRRGNNIASELENFMGLIEVVTGYVKIRHSHALVSLSFLKNLRLILGEEQLEGNYSFYVLDNQNLQQLWDWDHRNLTIKAGKMYFAFNPKLCVSEIYRMEEVTGTKGRQSKGDINTRNNGERASCESDVLHFTSTTTSKNRIIITWHRYRPPDYRDLISFTVYYKEAPFKNVTEYDGQDACGSNSWNMVDVDLPPNKDVEPGILLHGLKPWTQYAVYVKAVTLTMVENDHIRGAKSEILYIRTNASVPSIPLDVLSASNSSSQLIVKWNPPSLPNGNLSYYIVRWQRQPQDGYLYRHNYCSKDKIPIRKYADGTIDIEEVTENPKTEVCGGEKGPCCACPKTEAEKQAEKEEAEYRKVFENFLHNSIFVPRPERKRRDVMQVANTTMSSRSRNTTAADTYNITDPEELETEYPFFESRVDNKERTVISNLRPFTLYRIDIHSCNHEAEKLGCSASNFVFARTMPAEGADDIPGPVTWEPRPENSIFLKWPEPENPNGLILMYEIKYGSQVEDQRECVSRQEYRKYGGAKLNRLNPGNYTARIQATSLSGNGSWTDPVFFYVQAKTGYENFIHLIIALPVAVLLIVGGLVIMLYVFHRKRNNSRLGNGVLYASVNPEYFSAADVYVPDEWEVAREKITMSRELGQGSFGMVYEGVAKGVVKDEPETRVAIKTVNEAASMRERIEFLNEASVMKEFNCHHVVRLLGVVSQGQPTLVIMELMTRGDLKSYLRSLRPEMENNPVLAPPSLSKMIQMAGEIADGMAYLNANKFVHRDLAARNCMVAEDFTVKIGDFGMTRDIYETDYYRKGGKGLLPVRWMSPESLKDGVFTTYSDVWSFGVVLWEIATLAEQPYQGLSNEQVLRFVMEGGLLDKPDNCPDMLFELMRMCWQYNPKMRPSFLEIISSIKEEMEPGFREVSFYYSEENKLPEPEELDLEPENMESVPLDPSASSSSLPLPDRHSGHKAENGPGPGVLVLRASFDERQPYAHMNGGRKNERALPLPQSSTC

SEQ ID NO: 1539 - protein, 182 aa, Homo sapiens
LLSIMAQDQGEKENPMRELRIRKLCLNICVGESGDRLTRAAKVLEQLTGQTPVFSKARYTVRSFGIRRNEKIAVHCTVRGAKAEEILEKGLKVREYELRKNNFSDTGNFGFGIQEHIDLGIKYDPSIGIYGLDFYVVLGRPGFSIADKKRRTGCIGAKHRISKEEAMRWFQQKYDGIILPGK

SEQ ID NO: 1540 - protein, 179 aa, Homo sapiens
LLQQDQGEKENPMRELRIRKLCLNICVGESGDRLTRAAKVLEQLTGQTPVFSKARYTVRSFGIRRNEKIAVHCTVRGAKAEEILEKGLKVREYELRKNNFSDTGNFGFGIQEHIDLGIKYDPSIGIYGLDFYVVLGRPGFSIADKKRRTGCIGAKHRISKEEAMRWFQQKYDGIILPGK

SEQ ID NO: 1541 - protein, 37 aa, Homo sapiens
RNRIVCPLSRTSTLSTPLLMQVRVMTCFLLALRIISI

SEQ ID NO: 1542 - protein, 27 aa, Homo sapiens
MIIMKMDVSWIRRSKTALTQRPRFLCP

SEQ ID NO: 1543 - protein, 11 aa, Homo sapiens
IALYIVCYLTR

SEQ ID NO: 1544 - protein, 612 aa, Homo sapiens
LATLPRDPHPGRRSGRPPLTAPPQTRAWTPRASGATGRATMLMRKVPGFVPASPWGLRLPQKFLFLLFLSGLVTLCFGALFLLPHSSRLKRLFLAPRTQQPGLEVVAEIAGHAPAREQEPPPNPAPAAPAPGEDDPSSWASPRRRKGGLRRTRPTGPREEATAARGNSIPASRPGDEGVPFRFDFNAFRSRLRHPVLGTRADESQEPQSQVRAQREKIKEMMQFAWQSYKRYAMGKNELRPLTKDGYEGNMFGGLSGATVIDSLDTLYLMELKEEFQEAKAWVGESFHLNVSGEASLFEVNIRYIGGLLSAFYLTGEEVFRIKAIRLGEKLLPAFNTPTGIPKGVVSFKSGNWGWATAGSSSILAEFGSLHLEFLHLTELSGNQVFAEKATVRNIRKVLRKIEKPFGLYPNFLSPVSGNWVQHHVSVGGLGDSFYEYLIKSWLMSGKTDMEAKNMYYEALEAIETYLLNVSPGGLTYIAEWRGGILDHKMGHLACFSGGMIALGAEDAKEEKRAHYRELAAQITKTCHESYARSDTKLGPEAFWFNSGREAVATQLSESYYILRPEVVESYMYLWRQTHNPIYREWGWEGQGGLGEILSDRSRFLWDPRRVQ

SEQ ID NO: 1545 - protein, 43 aa, Homo sapiens
ILSLRCWTSLLLLIPLTSCNFSSPSWRMTASQVPSKRKASMTL

SEQ ID NO: 1546 - protein, 670 aa, Homo sapiens
LATLPRDPHPGRRSGRPPLTAPPQTRAWTPRASGATGRATMLMRKVPGFVPASPWGLRLPQKFLFLLFLSGLVTLCFGALFLLPHSSRLKRLFLAPRTQQPGLEVVAEIAGHAPAREQEPPPNPAPAAPAPGEDDPSSWASPRRRKGGLRRTRPTGPREEATAARGNSIPASRPGDEGVPFRFDFNAFRSRLRHPVLGTRADESQEPQSQVRAQREKIKEMMQFAWQSYKRYAMGKNELRPLTKDGYEGNMFGGLSGATVIDSLDTLYLMELKEEFQEAKAWVGESFHLNVSGEASLFEVNIRYIGGLLSAFYLTGEEVFRIKAIRLGEKLLPAFNTPTGIPKGVVSFKSGNWGWATAGSSSILAEFGSLHLEFLHLTELSGNQVFAEKVRNIRKVLRKIEKPFGLYPNFLSPVSGNWVQHHVSVGGLGDSFYEYLIKSWLMSGKTDMEAKNMYYEALEAIETYLLNVSPGGLTYIAEWRGGILDHKMGHLACFSGGMIALGAEDAKEEKRAHYRELAAQITKTCHESYARSDTKLGPEAFWFNSGREAVATQLSESYYILRPEVVESYMYLWRQTHNPIYREWGWEVVLALEKYCRTEAGFSGIQDVYSSTPNHDNKQQSFFLAETLKYLYLLFSEDDLLSLEDWVFNTEAHPLPVNHSDSSGRAWGRH

SEQ ID NO: 1547 - protein, 206 aa, Homo sapiens
LFCPAQAKREAVHLPGAALHSSPGRGTPHPHTPDITLAAGSRQLTSLLDPEKQEVGGLTWALCLAVSPDTKLGPEAFWFNSGREAVATQLSESYYILRPEVVESYMYLWRQTHNPIYREWGWEVVLALEKYCRTEAGFSGIQDVYSSTPNHDNKQQSFFLAETLKYLYLLFSEDDLLSLEDWVFNTEAHPLPVNHSDSSGRAWGRH

SEQ ID NO: 1548 - protein, 10 aa, Homo sapiens
IKSLIRIFLM

SEQ ID NO: 1549 - protein, 189 aa, Homo sapiens
LIVQNTLPVACLLFTMASSDIQVKELEKRASGQAFELILSPRSKESVPEFPLSPPKKKDLSLEEIQKKLEAAEERRKSHEAEVLKQLAEKREHEKEVLQKAIEENNNFSKMAEEKLTHKMEANKENREAQMAAKLERLREKMYFWTHGPGAHPAQISAEQSCLHSVPALCPALGLQSALITWSDLSHHH

SEQ ID NO: 1550 - protein, 127 aa, Homo sapiens
LIVQNTLPVACLLFTMASSDIQVKELEKRASGQAFELILSPRSKESVPEFPLSPPKKKDLSLEEIQKKLEAAEERRKVNEAIHRKQDINLCNGQINFISITGRKQNCSYTVIITYASDWKEIPVLIY

SEQ ID NO: 1551 - protein, 20 aa, Homo sapiens
LSRDHLPGPASLHDRNPGSV

SEQ ID NO: 1552 - protein, 496 aa, Homo sapiens
ISLEMANNYKKIVLLKGLEVINDYHFRIVKSLLSNDLKLNPKMKEEYDKIQIADLMEEKFPGDAGLGKLIEFFKEIPTLGDLAETLKREKLKVANKIESIPVKGIIPSKKTKQKEVYPATPACTPSNRLTAKGAEETLGPQKRKKPSEEETGTKRSKMSKEQTRPSCSAGASTSTAMGRSPPPQTSSSAPPNTSSTESLKPLANRHATASKNIFREDPIIAMVLNATKVFKYESSENEQRRMFHATVATQTQFFHVKVLNINLKRKFIKKRIIIISNYSKRNSLLEVNEASSVSEAGPDQTFEVPKDIIRRAKKIPKINILHKQTSGYIVYGLFMLHTKIVNRKTTIYEIQDKTGSMAVVGKGECHNIPCEKGDKLRLFCFRLRKRENMSKLMSEMHSFIQIQKNTNQRSHDSRSMALPQEQSQHPKPSEASTTLPESHLKTPQMPPTTPSSSSFTKKDETHPGAQSSPANFRITSPTVAPPLSSDTSTNRHPAVP

SEQ ID NO: 1553 - protein, 456 aa, Homo sapiens
ISLEMANNYKKIVLLKGLEVINDYHFRIVKSLLSNDLKLNPKMKEEYDKIQIADLMEEKFPGDAGLGKLIEFFKEIPTLGDLAETLKREKLKVKGIIPSKKTKQKEVYPATPACTPSNRLTAKGAEETLGPQKRKKPSEEETGTKRSKMSKEQTRPSCSAGASTSTAMGRSPPPQTSSSAPPNTSSTESLKPLANRHATASKNIFREDPIIAMVLNATKVFKYESSENEQRRMFHATVATQTQFFHVKVLNINLKRKFIKKRIIIISNYSKRNSLLEVNEASSVSEAGPDQTFEVPKDIIRRAKKIPKINILHKQTSGYIVYGLFMLHTKIVNRKTTIYEIQDKTGSMAVVGKGECHNIPCEKGDKLRLFCFRLRKRENMSKLMSEMHSFIQIQKNTNQRSHDSRSMALPQEQSQHPKPSEASTTLPESHLKTPQMPPTTPSSSSFTKVTKDKDIK

SEQ ID NO: 1554 - protein, 9 aa, Homo sapiens
ILGLLLGFT

SEQ ID NO: 1555 - protein, 22 aa, Homo sapiens
MVIISLCVLRCLVVVEDGVFYE

SEQ ID NO: 1556 - protein, 12 aa, Homo sapiens
IDTWLLSMLCLL

SEQ ID NO: 1557 - protein, 10 aa, Homo sapiens
VLLSSWLLFL

SEQ ID NO: 1558 - protein, 30 aa, Homo sapiens
MCLSRMFVVATLLVTAKMTHQWKQLASLLR

SEQ ID NO: 1559 - protein, 19 aa, Homo sapiens
TLFFLKKYTSCLLYFALGT

SEQ ID NO: 1560 - protein, 30 aa, Homo sapiens
KMQPILLLLAFLLLPRADADFSFRGDHRGT

SEQ ID NO: 1561 - protein, 17 aa, Homo sapiens
MIPLSRLRCPCSRHQRQ

SEQ ID NO: 1562 - protein, 19 aa, Homo sapiens
LGFLSALLALVLRARAGSK

SEQ ID NO: 1563 - protein, 27 aa, Homo sapiens
LPASGARAVHLAVPAVPDSLNPARSGS

SEQ ID NO: 1564 - protein, 23 aa, Homo sapiens
IPLKITIMAVFLCLKTVKQERII

SEQ ID NO: 1565 - protein, 22 aa, Homo sapiens
ISREENWSVFLWFWFGCHSVLS

SEQ ID NO: 1566 - protein, 26 aa, Homo sapiens
LVPRCQSSSPRLWPPLKSVAEFLWLL

SEQ ID NO: 1567 - protein, 447 aa, Homo sapiens
LEKFHSTSSKRGVHDGGRGKLGEDRKMSPKRIAKRRSPPADAIPKSKKVKVSHRSHSTEPGLVLTLGQGDVGQLGLGENVMERKKPALVSIPEDVVQAEAGGMHTVCLSKSGQVYSFGCNDEGALGRDTSVEGSEMVPGKVELQEKVVQVSAGDSHTAALTDDGRVFLWGSFRDNNGVIGLLEPMKKSMVPVQVQLDVPVVKVASGNDHLVMLTADGDLYTLGCGEQGQLGRVPELFANRGGRQGLERLLVPKCVMLKSRGSRGHVRFQDAFCGAYFTFAISHEGHVYGFGLSNYHQLGTPGTESCFIPQNLTSFKNSTKSWVGFSGGQHHTVCMDSEGKAYSLGRAEYGRLGLGEGAEEKSIPTLISRLPAVSSVACGASVGYAVTKDGRVFAWGMGTNYQLGTGQDEDAWSPVEMMGKQLENRVVLSVSSGGQHTVLLVKDKEQS

SEQ ID NO: 1568 - protein, 13 aa, Homo sapiens
VVLRLRPKNRDLT

SEQ ID NO: 1569 - protein, 7 aa, Homo sapiens
LFFMICI

SEQ ID NO: 1570 - protein, 1961 aa, Homo sapiens
IPLQGGDRRSLPSMAPTWGPGMVSVVGPMGLLVVLLVGGCAAEEPPRFIKEPKDQIGVSGGVASFVCQATGDPKPRVTWNKKGKKVNSQRFETIEFDESAGAVLRIQPLRTPRDENVYECVAQNSVGEITVHAKLTVLREDQLPSGFPNIDMGPQLKVVERTRTATMLCAASGNPDPEITWFKDFLPVDPSASNGRIKQLRSETFESTPIRGALQIESSEETDQGKYECVATNSAGVRYSSPANLYVRELREVRRVAPRFSILPMSHEIMPGGNVNITCVAVGSPMPYVKWMQGAEDLTPEDDMPVGRNVLELTDVKDSANYTCVAMSSLGVIEAVAQITVKSLPKAPGTPMVTENTATSITITWDSGNPDPVSYYVIEYKSKSQDGPYQIKEDITTTRYSIGGLSPNSEYEIWVSAVNSIGQGPPSESVVTRTGEQAPASAPRNVQARMLSATTMIVQWEEPVEPNGLIRGYRVYYTMEPEHPVGNWQKHNVDDSLLTTVGSLLEDETYTVRVLAFTSVGDGPLSDPIQVKTQQGVPGQPMNLRAEARSETSITLSWSPPRQESIIKYELLFREGDHGREVGRTFDPTTSYVVEDLKPNTEYAFRLAARSPQGLGAFTPVVRQRTLQSKPSAPPQDVKCVSVRSTAILVSWRPPPPETHNGALVGYSVRYRPLGSEDPEPKEVNGIPPTTTQILLEALEKWTQYRITTVAHTEVGPGPESSPVVVRTDEDVPSAPPRKVEAEALNATAIRVLWRSPAPGRQHGQIRGYQVHYVRMEGAEARGPPRIKDVMLADAQWETDDTAEYEMVITNLQPETAYSITVAAYTMKGDGARSKPKVVVTKGAVLGRPTLSVQQTPEGSLLARWEPPAGTAEDQVLGYRLQFGREDSTPLATLEFPPSEDRYTASGVHKGATYVFRLAARSRGGLGEEAAEVLSIPEDTPRGHPQILEAAGNASAGTVLLRWLPPVPAERNGAIVKYTVAVREAGALGPARETELPAAAEPGAENALTLQGLKPDTAYDLQVRAHTRRGPGPFSPPVRYRTFLRDQVSPKNFKVKMIMKTSVLLSWEFPDNYNSPTPYKIQYNGLTLDVDGRTTKKLITHLKPHTFYNFVLTNRGSSLGGLQQTVTAWTAFNLLNGKPSVAPKPDADGFIMVYLPDGQSPVPVQSYFIVMVPLRKSRGGQFLTPLGSPEDMDLEELIQDISRLQRRSLRHSRQLEVPRPYIAARFSVLPPTFHPGDQKQYGGFDNRGLEPGHRYVLFVLAVLQKSEPTFAASPFSDPFQLDNPDPQPIVDGEEGLIWVIGPVLAVVFIICIVIAILLYKNKPDSKRKDSEPRTKCLLNNADLAPHHPKDPVEMRRINFQTPDSGLRSPLREPGFHFESMLSHPPIPIADMAEHTERLKANDSLKLSQEYESIDPGQQFTWEHSNLEVNKPKNRYANVIAYDHSRVILQPIEGIMGSDYINANYVDGYRCQNAYIATQGPLPETFGDFWRMVWEQRSATIVMMTRLEEKSRIKCDQYWPNRGTETYGFIQVTLLDTIELATFCVRTFSLHKNGSSEKREVRQFQFTAWPDHGVPEYPTPFLAFLRRVKTCNPPDAGPIVVHCSAGVGRTGCFIVIDAMLERIKPEKTVDVYGHVTLMRSQRNYMVQTEDQYSFIHEALLEAVGCGNTEVPARSLYAYIQKLAQVEPGEHVTGMELEFKRLANSKAHTSRFISANLPCNKFKNRLVNIMPYESTRVCLQPIRGVEGSDYINASFIDGYRQQKAYIATQGPLAETTEDFWRMLWENNSTIVVMLTKLREMGREKCHQYWPAERSARYQYFVVDPMAEYNMPQYILREFKVTDARDGQSRTVRQFQFTDWPEQGVPKSGEGFIDFIGQVHKTKEQFGQDGPISVHCSAGVGRTGVFITLSIVLERMRYEGVVDIFQTVKMLRTQRPAMVQTEDEYQFCYQAALEYLGSFDHYAT

SEQ ID NO: 1571 - protein, 85 aa, Homo sapiens
MISTLAGCRPSEKLARLHFSLDVCGEEEDDEEEEDGVTEGLPEEQKKTMADRNLDQLLSNLEDLSNSIQKLHLAENAEPEEQSAA

SEQ ID NO: 1572 - protein, 626 aa, Homo sapiens
LAGLGVVGGGEMNAAASSYPMASLYVGDLHSDVTEAMLYEKFSPAGPVLSIRVCRDMITRRSLGYAYVNFQQPADAERALDTMNFDVIKGKPIRIMWSQRDPSLRKSGVGNVFIKNLDKSIDNKALYDTFSAFGNILSCKVVCDENGSKGYAFVHFETQEAADKAIEKMNGMLLNDRKVFVGRFKSRKEREAELGAKAKEFTNVYIKNFGEEVDDESLKELFSQFGKTLSVKVMRDPNGKSKGFGFVSYEKHEDANKAVEEMNGKEISGKIIFVGRAQKKVERQAELKRKFEQLKQERISRYQGVNLYIKNLDDTIDDEKLRKEFSPFGSITSAKVMLEDGRSKGFGFVCFSSPEEATKAVTEMNGRIVGSKPLYVALAQRKEERKAHLTNQYMQRVAGMRALPANAILNQFQPAAGGYFVPAVPQAQGRPPYYTPNQLAQMRPNPRWQQGGRPQGFQGMPSAIRQSGPRPTLRHLAPTGVPTAVQNLAPRAAVAAAAPRAVAPYKYASSVRSPHPAIQPLQAPQPAVHVQGQEPLTASMLAAAPPQEQKQMLGERLFPLIQTMHSNLAGKITGMLLEIDNSELLHMLESPESLRSKVDEAVAVLQAHHAKKEAAQKVGAVAAATS

SEQ ID NO: 1573 - protein, 671 aa, Homo sapiens
LAGLGVVGGGEMNAAASSYPMASLYVGDLHSDVTEAMLYEKFSPAGPVLSIRVCRDMITRRSLGYAYVNFQQPADAERALDTMNFDVIKGKPIRIMWSQRDPSLRKSGVGNVFIKNLDKSIDNKALYDTFSAFGNILSCKVVCDENGSKGYAFVHFETQEAADKAIEKMNGMLLNDRKVFVGRFKSRKEREAELGAKAKEFTNVYIKNFGEEVDDESLKELFSQFGKTLSVKVMRDPNGKSKGFGFVSYEKHEDANKAVEEMNGKEISGKIIFVGRAQKKVERQAELKRKFEQLKQERISRYQGVNLYIKNLDDTIDDEKLRKEFSPFGSITSAKVMLEDGRSKGFGFVCFSSPEEATKAVTEMNGRIVGSKPLYVALAQRKEERKAHLTNQYMQRVAGMRALPANAILNQFQPAAGGYFVPAVPQAQGRPPYYTPNQLAQMRPNPRWQQGGRPQGFQGMPSAIRQSGPRPTLRHLAPTGNAPASRGLPTTTQRVGSECPDRLAMDFGGAGAAQQGLTDSCQSGGVPTAVQNLAPRAAVAAAAPRAVAPYKYASSVRSPHPAIQPLQAPQPAVHVQGQEPLTASMLAAAPPQEQKQMLGERLFPLIQTMHSNLAGKITGMLLEIDNSELLHMLESPESLRSKVDEAVAVLQAHHAKKEAAQKVGAVAAATS

SEQ ID NO: 1574 - protein, 655 aa, Homo sapiens
LAGLGVVGGGEMNAAASSYPMASLYVGDLHSDVTEAMLYEKFSPAGPVLSIRVCRDMITRRSLGYAYVNFQQPADAERALDTMNFDVIKGKPIRIMWSQRDPSLRKSGVGNVFIKNLDKSIDNKALYDTFSAFGNILSCKVVCDENGSKGYAFVHFETQEAADKAIEKMNGMLLNDRKVFVGRFKSRKEREAELGAKAKEFTNVYIKNFGEEVDDESLKELFSQFGKTLSVKVMRDPNGKSKGFGFVSYEKHEDANKAVEEMNGKEISGKIIFVGRAQKKVERQAELKRKFEQLKQERISRYQGVNLYIKNLDDTIDDEKLRKEFSPFGSITSAKVMLEDGRSKGFGFVCFSSPEEATKAVTEMNGRIVGSKPLYVALAQRKEERKAHLTNQYMQRVAGMRALPANAILNQFQPAAGGYFVPAVPQAQGRPPYYTPNQLAQMRPNPRWQQGGRPQGFQGMPSAIRQSGPRPTLRHLAPTGSECPDRLAMDFGGAGAAQQGLTDSCQSGGVPTAVQNLAPRAAVAAAAPRAVAPYKYASSVRSPHPAIQPLQAPQPAVHVQGQEPLTASMLAAAPPQEQKQMLGERLFPLIQTMHSNLAGKITGMLLEIDNSELLHMLESPESLRSKVDEAVAVLQAHHAKKEAAQKVGAVAAATS

SEQ ID NO: 1575 - protein, 642 aa, Homo sapiens
LAGLGVVGGGEMNAAASSYPMASLYVGDLHSDVTEAMLYEKFSPAGPVLSIRVCRDMITRRSLGYAYVNFQQPADAERALDTMNFDVIKGKPIRIMWSQRDPSLRKSGVGNVFIKNLDKSIDNKALYDTFSAFGNILSCKVVCDENGSKGYAFVHFETQEAADKAIEKMNGMLLNDRKVFVGRFKSRKEREAELGAKAKEFTNVYIKNFGEEVDDESLKELFSQFGKTLSVKVMRDPNGKSKGFGFVSYEKHEDANKAVEEMNGKEISGKIIFVGRAQKKVERQAELKRKFEQLKQERISRYQGVNLYIKNLDDTIDDEKLRKEFSPFGSITSAKVMLEDGRSKGFGFVCFSSPEEATKAVTEMNGRIVGSKPLYVALAQRKEERKAHLTNQYMQRVAGMRALPANAILNQFQPAAGGYFVPAVPQAQGRPPYYTPNQLAQMRPNPRWQQGGRPQGFQGMPSAIRQSGPRPTLRHLAPTGNAPASRGLPTTTQRVGVPTAVQNLAPRAAVAAAAPRAVAPYKYASSVRSPHPAIQPLQAPQPAVHVQGQEPLTASMLAAAPPQEQKQMLGERLFPLIQTMHSNLAGKITGMLLEIDNSELLHMLESPESLRSKVDEAVAVLQAHHAKKEAAQKVGAVAAATS

SEQ ID NO: 1576 - protein, 103 aa, Homo sapiens
LTASMLAAAPPQEQKQMLGERLFPLIQTMHSNLAGKITGMLLEIDNSELLHMLESPESLRSKVSWGSDPAASVLSLGRLGANLDAQVQQKVGSAAPRTPLVMP

SEQ ID NO: 1577 - protein, 356 aa, Homo sapiens
LSSPTAAAGLVTITPREEPQLPQPAPVTITATMSSEAETQQPPAAPPAAPALSAADTKPGTTGSGAGSGGPGGLTSAAPAGGDKKVIATKVLGTVKWFNVRNGYGFINRNDTKEDVFVHQTAIKKNNPRKYLRSVGDGETVEFDVVEGEKGAEAANVTGPGGVPVQGSKYAADRNHYRRYPRRRGPPRNYQQNYQNSESGEKNEGSESAPEGQAQQRRPYRRRRFPPYYMRRPYGRRPQYSNPPVQGEVMEGADNQGAGEQGRPVRQNMYRGYRPRFRRGPPRQRQPREDGNEEDKENQGDETQGQQPPQRRYRRNFNYRRRRPENPKPQDGKETKAADPPAENSSAPEAEQGGAE

SEQ ID NO: 1578 - protein, 394 aa, Homo sapiens
LPFPLYPHCYQLLLATPRYPLPPFVSLWVSRPRMYPEALPVGILSNPDTFKRRSGSYSNDKPEVWFAAGSGSPNQKLSSSCVGRACGEMDTPPLSDSESESDESLVTDRELQDAFSRGLLKPGLNVVLEGPKKAVNDVNGLKQCLAEFKRDLEWVERLDVTLGPVPEIGGSEAPAPQNKDQKAVDPEDDFQREMSFYRQAQAAVLAVLPRLHQLKVPTKRPTDYFAEMAKSDLQMQKIRQKLQTKQAAMERSEKAKQLRALRKYGKKVQTEVLQKRQQEKAHMMNAIKKYQKGFSDKLDFLEGDQKPLAQRKKAGAKGQQMRKGPSAKRRYKNQKFGFGGKKKGSKWNTRESYDDVSSFRAKTAHGRGLKRPGKKGSNKRPGKRTREKMKNRTH

SEQ ID NO: 1579 - protein, 98 aa, Homo sapiens
MDTPPLSDSESESDESLVTDRELQDAFSRGLLKPGLNVVLEGPKKAVNDVVSVGTGSGVLGHGMRFRRCWAWETDSCPRKDAPCASPRGSITCLGIGD

SEQ ID NO: 1580 - protein, 556 aa, Homo sapiens
LEAEPVSVVPVTRAPTHRRHGRKRCQRDAGVGYGMMVVSTYIGIYYNVVICIAFYYFFSSMTHVLPWAYCNNPWNTHDCAGVLDASNLTNGSRPAALPSNLSHLLNHSLQRTSPSEEYWRLYVLKLSDDIGNFGEVRLPLLGCLGVSWLVVFLCLIRGVKSSGKVVYFTATFPYVVLTILFVRGVTLEGAFDGIMYYLTPQWDKILEAKVWGDAASQIFYSLGCAWGGLITMASYNKFHNNCYRDSVIISITNCATSVYAGFVIFSILGFMANHLGVDVSRVADHGPGLAFVAYPEALTLLPISPLWSLLFFFMLILLGLGTQFCLLETLVTAIVDEVGNEWILQKKTYVTLGVAVAGFLLGIPLTSQAGIYWLLLMDNYAASFSLVVISCIMCVAIMYIYGHRNYFQDIQMMLGFPPPLFFQICWRFVSPAIIFFILVFTVIQYQPITYNHYQYPGWAVAIGFLMALSSVLCIPLYAMFRLCRTDGDTLLQRLKNATKPSRDWGPALLEHRTGRYAPTIAPSPEDGFEVQPLHPDKAQIPIVGSNGSSRLQDSRI

SEQ ID NO: 1581 - protein, 245 aa, Homo sapiens
LRFLGIARFSSLLTLRMAMDSSLQARLFPGLAIKIQRSNGLIHSANVRTVNLEKSCVSVEWAEGGATKGKEIDFDDVAAINPELLQLLPLHPKDNLPLQENVTIQKQKRRSVNSKIPAPKESLRSRSTRMSTVSELRITAQENDMEVELPAAANSRKQFSVPLRRKSCLVKEVEKMKNKREEKKAQNSEMRMKRAQEYDSSFPNWEFARMIKEFRATLECHPLTMTDPGAPPEILSFCRIGQERN

SEQ ID NO: 1582 - protein, 741 aa, Homo sapiens
LRFLGIARFSSLLTLRMAMDSSLQARLFPGLAIKIQRSNGLIHSANVRTVNLEKSCVSVEWAEGGATKGKEIDFDDVAAINPELLQLLPLHPKDNLPLQENVTIQKQKRRSVNSKIPAPKESLRSRSTRMSTVSELRITAQENDMEVELPAAANSRKQFSVPPAPTRPSCPAVAEIPLRMVSEEMEEQVHSIRGSSSANPVNSVRRKSCLVKEVEKMKNKREEKKAQNSEMRMKRAQEYDSSFPNWEFARMIKEFRATLECHPLTMTDPIEEHRICVCVRKRPLNKQELAKKEIDVISIPSKCLLLVHEPKLKVDLTKYLENQAFCFDFAFDETASNEVVYRFTARPLVQTIFEGGKATCFAYGQTGSGKTHTMGGDLSGKAQNASKGIYAMASRDVFLLKNQPCYRKLGLEVYVTFFEIYNGKLFDLLNKKAKLRVLEDGKQQVQVVGLQEHLVNSADDVIKMIDMGSACRTSGQTFANSNSSRSHACFQIILRAKGRMHGKFSLVDLAGNERGADTSSADRQTRMEGAEINKSLLALKECIRALGQNKAHTPFRESKLTQVLRDSFIGENSRTCMIATISPGISSCEYTLNTLRYADRVKELSPHSGPSGEQLIQMETEEMEACSNGALIPGNLSKEEEELSSQMSSFNEAMTQIRELEEKAMEELKEIIQQGPDWLELSEMTEQPDYDLETFVNKAESALAQQAKHFSALRDVIKALRLAMQLEEQASRQISSKKRPQ

SEQ ID NO: 1583 - protein, 225 aa, Homo sapiens
LSAAHTPLVGPPRRCGNLVEPQADRKMSSGNAKIGHPAPNFKATAVMPDGQFKDISLSDYKGKYVVFFFYPLDFTFVCPTEIIAFSDRAEEFKKLNCQVIGASVDSHFCHLAWVNTPKKQGGLGPMNIPLVSDPKRTIAQDYGVLKADEGISFRGLFIIDDKGILRQITVNDLPVGRSVDETLRLVQAFQFTDKHGEVCPAGWKPGSDTIKPDVQKSKEYFSKQK

SEQ ID NO: 1584 - protein, 233 aa, Homo sapiens
LAIKAAPRRALARLVLAWCRWLVSATCVGTADRKMSSGNAKIGHPAPNFKATAVMPDGQFKDISLSDYKGKYVVFFFYPLDFTFVCPTEIIAFSDRAEEFKKLNCQVIGASVDSHFCHLAWVNTPKKQGGLGPMNIPLVSDPKRTIAQDYGVLKADEGISFRGLFIIDDKGILRQITVNDLPVGRSVDETLRLVQAFQFTDKHGEVCPAGWKPGSDTIKPDVQKSKEYFSKQK

SEQ ID NO: 1585 - protein, 13 aa, Homo sapiens
MMETPWLRRPSSL

SEQ ID NO: 1586 - protein, 27 aa, Homo sapiens
LARSFLFSFHLLFISSETHALVLAFGP

SEQ ID NO: 1587 - protein, 1253 aa, Homo sapiens
LLCLVACWLLGAGAEADFSILDEAQVLASQMRRLAAEELGVVTMQRIFNSFVYTEKISNGESEVQQLAKKIREKFNRYLDVVNRNKQVVEASYTAHLTSPLTAIQDCCTIPPSMMEFDGNFNTNVSRTISCDRLSTTVNSRAFNPGRDLNSVLADNLKSNPGIKWQYFSSEEGIFTVFPAHKFRCKGSYEHRSRPIYVSTVRPQSKHIVVILDHGASVTDTQLQIAKDAAQVILSAIDEHDKISVLTVADTVRTCSLDQCYKTFLSPATSETKRKMSTFVSSVKSSDSPTQHAVGFQKAFQLIRSTNNNTKFQANTDMVIIYLSAGITSKDSSEEDKKATLQVINEENSFLNNSVMILTYALMNDGVTGLKELAFLRDLAEQNSGKYGVPDRMALPVIKGSMMVLNQLSNLETTVGRFYTNLPNRMIDEAVFSLPFSDEMGDGLIMTVSKPCYFGNLLLGIVGVDVNLAYILEDVTYYQDSLASYTFLIDDKGYTLMHPSLTRPYLLSEPPLHTDIIHYENIPKFELVRQNILSLPLGSQIIAVPVNSSLSWHINKLRETGKEAYNVSYAWKMVQDTSFILCIVVIQPEIPVKQLKNLNTVPSSKLLYHRLDLLGQPSACLHFKQLATLESPTIMLSAGSFSSPYEHLSQPETKRMVEHYTAYLSDNTRLIANPGLKFSVRNEVMATSHVTDEWMTQMEMSSLNTYIVRRYIATPNGVLRIYPGSLMDKAFDPTRRQWYLHAVANPGLISLTGPYLDVGGAGYVVTISHTIHSSSTQLSSGHTVAVMGIDFTLRYFYKVLMDLLPVCNQDGGNKIRCFIMEDRGYLVAHPTLIDPKGHAPVEQQHITHKEPLVANDILNHPNFVKKNLCNSFSDRTVQRFYKFNTSLAGDLTNLVHGSHCSKYRLARIPGTNAFVGIVNETCDSLAFCACSMVDRLCLNCHRMEQNECECPCECPLEVNECTGNLTNAENRNPSCEVHQEPVTYTAIDPGLQDALHQCVNSRCSQRLESGDCFGVLDCEWCMVDSDGKTHLDKPYCAPQKECFGGIVGAKSPYVDDMGAIGDEVITLNMIKSAPVGPVAGGIMGCIMVLVLAVYAYRHQIHRRSHQHMSPLAAQEMSVRMSNLENDRDERDDDSHEDRGIISNTRFIAAVIERHAHSPERRRRYWGRSGTESDHGYSTMSPQEDSENPPCNNDPLSAGVDVGNHDEDLDLDTPPQTAALLSHKFHHYRSHHPTLHHSHHLQAAVTVHTVDAEC

SEQ ID NO: 1588 - protein, 387 aa, Homo sapiens
LPPLSKKSLLPPTMILRPYQPCGTVKEFDTNFTYVQQSEFYLEPNIKYVFQVRCQETGKRYWQPWSSLFFHKTPETVPQVTSKAFQHDTWNSGLTVASISTGHLTSDNRGDIGLLLGMIVFAVMLSILSLIGIFNRSFRTGIKRRILLLIPKWLYEDIPNMKNSNVVKMLQENSELMNNNSSEQVLYVDPMITEIKEIFIPEHKPTDYKKENTGPLETRDYPQNSLFDNTTVVYIPDLNTGYKPQISNFLPEGSHLSNNNEITSLTLKPPVDSLDSGNNPRLQKHPNFAFSVSSVNSLSNTIFLGELSLILNQGECSSPDIQNSVEEETTMLLENDSPSETIPEQTLLPDEFVSCLGIVNEELPSINTYFPQNILESHFNRISLLEK

SEQ ID NO: 1589 - protein, 218 aa, Homo sapiens [sequence omitted]

SEQ ID NO: 1590 - protein, 651 aa, Homo sapiens
LFLDLRCYRAGSSRLAVAMESGPKMLAPVCLVENNNEQLLVNQQAIQILEKISQPVVVVAIVGLYRTGKSYLMNHLAGQNHGFPLGSTVQSETKGIWMWCVPHPSKPNHTLVLLDTEGLGDVEKGDPKNDSWIFALAVLLCSTFVYNSMSTINHQALEQLHYVTELTELIKAKSSPRPDGVEDSTEFVSFFPDFLWTVRDFTLELKLNGHPITEDEYLENALKLIQGNNPRVQTSNFPRECIRRFFPKRKCFVFDRPTNDKDLLANIEKVSEKQLDPKFQEQTNIFCSYIFTHARTKTLREGITVTGNRLGTLAVTYVEAINSGAVPCLENAVITLAQRENSAAVQRAADYYSQQMAQRVKLPTDTLQELLDMHAACEREAIAIFMEHSFKDENQEFQKKFMETTMNKKGDFLLQNEESSVQYCQAKLNELSKGLMESISAGSFSVPGGHKLYMETKERIEQDYWQVPRKGVKAKEVFQRFLESQMVIEESILQSDKALTDREKAVAVDRAKKEAAEKEQELLKQKLQEQQQQMEAQDKSRKENIAQLKEKLQMEREHLLREQIMMLEHTQKVQNDWLHEGFKKKYEEMNAEISQFKRMIDTTKNDDTPWIARTLDNLADELTAILSAPAKLIGHGVKGVSSLFKKHKLPF

SEQ ID NO: 1591 - protein, 52 aa, Homo sapiens
LCRCLKRYLLCLITWLLFPTCTMTKMPSTYLIQPFQYNSYTCHLSKPKGTSS

SEQ ID NO: 1592 - protein, 95 aa, Homo sapiens
LVILRSLCISWTALLELSSKSTVGWVGGSADFSLDFHIWDELAVISSRKGVAVLHWLFSSHSSSRYCNKELEKYSQMGSSPCCQGACHLMGETGK

SEQ ID NO: 1593 - protein, 57 aa, Homo sapiens
LLLVSLLLKFEMLYLIGLGLGDAKDITVKGLEVVRRCSRVYLEAYTSVLTVGKEALG

SEQ ID NO: 1594 - protein, 730 aa, Homo sapiens
LKHVFDDLRGSVSLSWVGDSTGVILVLTTFHVPLVIMTFGQSKLYRSEDYGKNFKDITDLINNTFIRTEFGMAIGPENSGKVVLTAEVSGGSRGGRIFRSSDFAKNFVQTDLPFHPLTQMMYSPQNSDYLLALSTENGLWVSKNFGGKWEEIHKAVCLAKWGSDNTIFFTTYANGSCTDLGALELWRTSDLGKSFKTIGVKIYSFGLGGRFLFASVMADKDTTRRIHVSTDQGDTWSMAQLPSVGQEQFYSILAANDDMVFMHVDEPGDTGFGTIFTSDDRGIVYSKSLDRHLYTTTGGETDFTNVTSLRGVYITSVLSEDNSIQTMITFDQGGRWTHLRKPENSECDATAKNKNECSLHIHASYSISQKLNVPMAPLSEPNAVGIVIAHGSVGDAISVMVPDVYISDDGGYSWTKMLEGPHYYTILDSGGIIVAIEHSSRPINVIKFSTDEGQCWQTYTFTRDPIYFTGLASEPGARSMNISIWGFTESFLTSQWVSYTIDFKDILERNCEEKDYTIWLAHSTDPEDYEDGCILGYKEQFLRLRKSSVCQNGRDYVVTKQPSICLCSLEDFLCDFGYYRPENDSKCVEQPELKGHDLEFCLYGREEHLTTNGYRKIPGDKCQGGVNPVREVKDLKKKCTSNFLSPEKQNSKSNSVPIILAIVGLMLVTVVAGVLIVKKYVCGGRFLVHRYSVLQQHAEANGVDGVDALDTASHTNKSGYHDDSDEDLLE

SEQ ID NO: 1595 - protein, 222 aa, Homo sapiens
VGAAQSLNRCLPQLAHAIRLLLEFTDTSYEEKRYTCGEAPDYDRSQWLDVKFKLDLDFPNLPYLLDGKNKITQSNAILRYIARKHNMCGETEEEKIRVDIIENQVMDFRTQLIRLCYSSDHEKLKPQYLEELPGQLKQFSMFLGKFSWFAGEKLTFVDFLTYDILDQNRIFDPKCLDEFPNLKAFMCRFEALEKIAAYLQSDQFCKMPINNKMAQWGNKPVC

SEQ ID NO: 1596 - protein, 198 aa, Homo sapiens
VRVVYGSRVLGYSWAPDYDRSQWLDVKFKLDLDFPNLPYLLDGKNKITQSNAILRYIARKHNMCGETEEEKIRVDIIENQVMDFRTQLIRLCYSSDHEKLKPQYLEELPGQLKQFSMFLGKFSWFAGEKLTFVDFLTYDILDQNRIFDPKCLDEFPNLKAFMCRFEALEKIAAYLQSDQFCKMPINNKMAQWGNKPVC

SEQ ID NO: 1597 - protein, 628 aa, Homo sapiens
MPPSPLLKGCAEGWPVRLGPGKVKVCLGPLGARAALRIPGQRCGPRPGRPLRSSQRASERARAADAPGRDPAARMTAPGAAGRCPPTTWLGSLLLLVCLLASRSITEEVSEYCSHMIGSGHLQSLQRLIDSQMETSCQITFEFVDQEQLKDPVCYLKKAFLLVQDIMEDTMRFRDNTPNAIAIVQLQELSLRLKSCFTKDYEEHDKACVRTFYETPLQLLEKVKNVFNETKNLLDKDWNIFSKNCNNSFAECSSQDVVTKPDCNCLYPKAIPSSDPASVSPHQPLAPSMAPVAGLTWEDSEGTEGSSLLPGEQPLHTVDPGSAKQRPPRSTCQSFEPPETPVVKDSTIGGSPQPRPSVGAFNPGMEDILDSAMGTNWVPEEASGEASEIPVPQGTELSPSRPGGGSMQTEPARPSNFLSASSPLPASAKGQQPADVTGTALPRVGPVRPTGQDWNHTPQKTDHPSALLRDPPEPGSPRISSLRPQGLSNPSTLSAQPQLSRSHSSGSVLPLGELEGRRSTRDRRSPAEPEGGPASEGAARPLPRFNSVPLTDTGHERQSEGSFSPQLQESVFHLLVPSVILVLLAVGGLLFYRWRRRSHQEPQRADSPLEQPEGSPLTQDDRQVELPV

SEQ ID NO: 1598 - protein, 161 aa, Homo sapiens
LGRVPLPLGLSSPTCKMGMMVELALWDTAGQEDYDRLRPLSYPDTDVILMCFSIDSPDSLENIPEKWTPEVKHFCPNVPIILVGNKKDLRQDEHTRRELAKMKQEPVRSEEGRDMANRISAFGYLECSAKTKEGVREVFEMATRAGLQVRKNKRRRGCPIL

SEQ ID NO: 1599 - protein, 247 aa, Homo sapiens
LGGGRTASAPPRAAARGPGPAGRGSGLLSLDFISAPEPALSSCSLGTSAGWSPTMAAIRKKLVIVGDGACGKTCLLIVFSKDQFPEVYVPTVFENYIADIEVDGKQVELALWDTAGQEDYDRLRPLSYPDTDVILMCFSIDSPDSLENIPEKWTPEVKHFCPNVPIILVGNKKDLRQDEHTRRELAKMKQEPVRSEEGRDMANRISAFGYLECSAKTKEGVREVFEMATRAGLQVRKNKRRRGCPIL

SEQ ID NO: 1600 - protein, 315 aa, Homo sapiens
VLPPLARLLRSPGISPWLSPTWRGGRPWPPVPGLRRGPVAAALRGAGAGRAKGRPRPTLPLPGPPSPPRRWRRAGRGPGVSLSLRHRPRSWRRRSGSLDFISAPEPALSSCSLGTSAGWSPTMAAIRKKLVIVGDGACGKTCLLIVFSKDQFPEVYVPTVFENYIADIEVDGKQVELALWDTAGQEDYDRLRPLSYPDTDVILMCFSIDSPDSLENIPEKWTPEVKHFCPNVPIILVGNKKDLRQDEHTRRELAKMKQEPVRSEEGRDMANRISAFGYLECSAKTKEGVREVFEMATRAGLQVRKNKRRRGCPIL

SEQ ID NO: 1601 - protein, 292 aa, Homo sapiens
VLPPLARLLRSPGISPWLSPTWRGGRPWPPVPGLRRGPVAAALRGAGAGRAKGRPRPTLPLPGPPSPPRRWRRAGRGPGVSLSLRHRPRSWRRRSGSPTMAAIRKKLVIVGDGACGKTCLLIVFSKDQFPEVYVPTVFENYIADIEVDGKQVELALWDTAGQEDYDRLRPLSYPDTDVILMCFSIDSPDSLENIPEKWTPEVKHFCPNVPIILVGNKKDLRQDEHTRRELAKMKQEPVRSEEGRDMANRISAFGYLECSAKTKEGVREVFEMATRAGLQVRKNKRRRGCPIL

SEQ ID NO: 1602 - protein, 217 aa, Homo sapiens
LPLPALVARAWGLGIPPPGRSMGRFRGGLRCIKYLLLGFNLLFWLAGSAVIAFGLWFRFGGAIKELSSEDKSPEYFYVGLYVLVGAGALMMAVGFFGCCGAMRESQCVLGSAIRHVQTMYEEAYNDYLKDRGKGNGTLITFHSTFQCCGKESSEQVQPTCPKELLGHKNCIDEIETIISVKLQLIGIVGIGIAGLTIFGMIFSMVLCCAIRNSRDVI

SEQ ID NO: 1603 - protein, 136 aa, Homo sapiens
LGSGSWRILPSYSSAPGRTAASWLRYFYSQRPIPRPTPAMAFANLRKVLISDSLDPCCRKILQDGGLQVVEKQNLSKEELIAELQDCEGLIVRSATKVTADVINAAEKLQVVGRAGTGVDNVDLEAATRKGILVMK

SEQ ID NO: 1604 - protein, 204 aa, Homo sapiens
LGSGSWRILPSYSSAPGRTAASWLRYFYSQRPIPRPTPAMAFANLRKVLISDSLDPCCRKILQDGGLQVVEKQNLSKEELIAELQDCEGLIVRSATKVTADVINAAEKLQVVGRAGTGVDNVDLEAATRKGILVMNTPNGNSLSAAELTCGMIMCLARPETFRDQEITFPMARPAFPPAGGGSGGIYLCSNSSLQFPSELSGIH

SEQ ID NO: 1605 - protein, 572 aa, Homo sapiens
LGSGSWRILPSYSSAPGRTAASWLRYFYSQRPIPRPTPAMAFANLRKVLISDSLDPCCRKILQDGGLQVVEKQNLSKEELIAELQDCEGLIVRSATKVTADVINAAEKLQVVGRAGTGVDNVDLEAATRKGILVMNTPNGNSLSAAELTCGMIMCLARQIPQATASMKDGKWERKKFMGTELNGKTLGILGLGRIGREVATRMQSFGMKTIGYDPIISPEVSASFGVQQLPLEEIWPLCDFITVHTPLLPSTTGLLNDNTFAQCKKGVRVVNCARGGIVDEGALLRALQSGQCAGAALDVFTEEPPRDRALVDHENVISCPHLGASTKEAQSRCGEEIAVQFVDMVKGKSLTGVVNAQALTSAFSPHTKPWIGLAEALGTLMRAWAGSPKGTIQVITQGTSLKNAGNCLSPAVIVGLLKEASKQADVNLVNAKLLVKEAGLNVTTSHSPAAPGEQGFGECLLAVALAGAPYQAVGLVQGTTPVLQGLNGAVFRPEVPLRRDLPLLLFRTQTSDPAMLPTMIGLLAEAGVRLLSYQTSLVSDGETWHVMGISSLLPSLEAWKQHVTEAFQFHF

SEQ ID NO: 1606 - protein, 582 aa, Homo sapiens
LRGPTSECPVVSCPRMGTTARAALVLTYLAVASAASEGGFTATGQRQLRPEHFQEVGYAAPPSPPLSRSLPMDHPDSSQHGPPFEGQSGKEGRGPRPHSQPWLGERVGCSHIPPSIVQPPPSQEATPLQQEKLLPAQLPAEKEVGPPLPQEAVPLQKELPSLQHPNEQKEGTPAPFGDQSHPEPESWNAAQHCQQDRSQGGWGHRLDGFPPGRPSPDNLNQICLPNRQHVVYGPWNLPQSSYSHLTRQGETLNFLEIGYSRCCHCRSHTNRLECAKLVWEEAMSRFCEAEFSVKTRPHWCCTRQGEARFSCFQEEAPQPHYQLRACPSHQPDISSGLELPFPPGVPTLDNIKNICHLRRFRSVPRNLPATDPLQRELLALIQLEREFQRCCRQGNNHTCTWKAWEDTLDKYCDREYAVKTHHHLCCRHPPSPTRDECFARRAPYPNYDRDILTIDIGRVTPNLMGHLCGNQRVLTKHKHIPGLIHNMTARCCDLPFPEQACCAEEEKLTFINDLCGPRRNIWRDPALCCYLSPGDEQVNCFNINYLRNVALVSGDTENAKGQGEQGSTGGTNISSTSEPKEE

SEQ ID NO: 1607 - protein, 555 aa, Homo sapiens
LRGPTSECPVVSCPRMGTTARAALVLTYLAVASAASEGGFTATGQRQLRPEHFQEVGYAAPPSPPLSRSLPMDHPDSSQHGPPFEGQSQVQPPPSQEATPLQQEKLLPAQLPAEKEVGPPLPQEAVPLQKELPSLQHPNEQKEGTPAPFGDQSHPEPESWNAAQHCQQDRSQGGWGHRLDGFPPGRPSPDNLNQICLPNRQHVVYGPWNLPQSSYSHLTRQGETLNFLEIGYSRCCHCRSHTNRLECAKLVWEEAMSRFCEAEFSVKTRPHWCCTRQGEARFSCFQEEAPQPHYQLRACPSHQPDISSGLELPFPPGVPTLDNIKNICHLRRFRSVPRNLPATDPLQRELLALIQLEREFQRCCRQGNNHTCTWKAWEDTLDKYCDREYAVKTHHHLCCRHPPSPTRDECFARRAPYPNYDRDILTIDIGRVTPNLMGHLCGNQRVLTKHKHIPGLIHNMTARCCDLPFPEQACCAEEEKLTFINDLCGPRRNIWRDPALCCYLSPGDEQVNCFNINYLRNVALVSGDTENAKGQGEQGSTGGTNISSTSEPKEE

SEQ ID NO: 1608 - protein, 430 aa, Homo sapiens
LRGPTSECPVVSCPRMGTTARAALVLTYLAVASAASEGGFTATGQRQLRPEHFQEVGYAAPPSPPLSRSLPMDHPDSSQHGPPFEGQSQVQPPPSQEATPLQQEKLLPAQLPAEKEVGPPLPQEAVPLQKELPSLQHPNEQKEGTPAPFGDQSHPEPESWNAAQHCQQDRSQGGWGHRLDGFPPGRPSPDNLNQICLPNRQHVVYGPWNLPQSSYSHLTRQGETLNFLEIGYSRCCHCRSHTNRLECAKLVWEDTLDKYCDREYAVKTHHHLCCRHPPSPTRDECFARRAPYPNYDRDILTIDIGRVTPNLMGHLCGNQRVLTKHKHIPGLIHNMTARCCDLPFPEQACCAEEEKLTFINDLCGPRRNIWRDPALCCYLSPGDEQVNCFNINYLRNVALVSGDTENAKGQGEQGSTGGTNISSTSEPKEE

SEQ ID NO: 1609 - protein, 159 aa, Homo sapiens
LRQENRLNPGGGGCDPKLMKEEQMSQAQLFTRSFDDGLGFEYVMFYNDIEKRMVCLFQGGPYLEGPPGFIHGGAIATMIDATVGMCAMMAGGIVMTANLNINYKRPIPLCSVVMINSQLDKVEGRKFFVSCNVQSVDEKTLYSEATSLFIKLNPAKSLT

SEQ ID NO: 1610 - protein, 126 aa, Homo sapiens
LCGSSALTECKTMTCKMSQLERNIETIINTFHQYSVKLGHPDTLNQGEFKELVRKDLQNFLKKENKNEKVIEHIMEDLDTNADKQLSFEEFIMLMARLTWASHEKMHEGDEGPGHHHKPGLGEGTP

SEQ ID NO: 1611 - protein, 127 aa, Homo sapiens
LAKPNRYKKELPLSPACLLSAVFQKTWWGKSVGIMLTELEKALNSIIDVYHKYSLIKGNFHAVYRDDLKKLLETECPQYIRKKGADVWFKELDINTDGAVNFQEFLILVIKMGVAAHKKSHEESHKE

SEQ ID NO: 1612 - protein, 108 aa, Homo sapiens
VLILTAVMACPLEKALDVMVSTFHKYSGKEGDKFKLNKSELKELLTRELPSFLGKRTDEAAFQKLMSNLDSNRDNEVDFQEYCVFLSCIAMMCNEFFEGFPDKQPRKK

SEQ ID NO: 1613 - protein, 236 aa, Homo sapiens
LAWAPCRSVCQPSSPAYQCRALPTPPPAPPVSAMAKAYDHLFKLLLIGDSGVGKTCLIIRFAEDNFNNTYISTIGIDFKIRTVDIEGKKIKLQVWDTAGQERFKTITTAYYRGAMGIILVYDITDEKSFENIQNWMKSIKENASAGVERLLLGNKCDMEAKRKVQKEQADKLAREHGIRFFETSAKSSMNVDEAFSSLARDILLKSGGRRSGNGNKPPSTDLKTCDKKNTNKCSLG

SEQ ID NO: 1614 - protein, 149 aa, Homo sapiens
LLLGVPANKRDRAGIRIWEQVLEYNAIGGKYNRGLTVVVAFRELVEPRKQDADSLQRAWTVGWCVELLQAFFLVADDIMDSSLTRRGQICWYQKPGVGLDAINDANLLEACIYRLLKLYCREQPYYLNLIELFLQVYCRQGPMPRGCPW

SEQ ID NO: 1615 - protein, 326 aa, Homo sapiens
LLLGVPANKRDRAGIRIWEQVLEYNAIGGKYNRGLTVVVAFRELVEPRKQDADSLQRAWTVGWCVELLQAFFLVADDIMDSSLTRRGQICWYQKPGVGLDAINDANLLEACIYRLLKLYCREQPYYLNLIELFLQSSYQTEIGQTLDLLTAPQGNVDLVRFTEKRYKSIVKYKTAFYSFYLPIAAAMYMAGIDGEKEHANAKKILLEMGEFFQIQDDYLDLFGDPSVTGKIGTDIQDNKCSWLVVQCLQRATPEQYQILKENYGQKEAEKVARVKALYEELDLPAVFLQYEEDSYSHIMALIEQYAAPLPPAVFLGLARKIYKRRK

SEQ ID NO: 1616 - protein, 198 aa, Homo sapiens
LEACIYRLLKLYCREQPYYLNLIELFLQSSYQTEIGQTLDLLTAPQGNVDLVRFTEKRYKSIVKYKTAFYSFYLPIAAAMYMAGIDGEKEHANAKKILLEMGEFFQIQDNKCSWLVVQCLQRATPEQYQILKENYGQKEAEKVARVKALYEELDLPAVFLQYEEDSYSHIMALIEQYAAPLPPAVFLGLARKIYKRRK

SEQ ID NO: 1617 - protein, 133 aa, Homo sapiens
VFAGAPHLHQPTQIPRSDSARPRSPRLPGASREPAGRRTPTPSSLCPSTRAPRPFRDPCPAGSAANLPAMETPSQRRATRSGAQASSTPLSPTRITRLQEKEDLQELNDRLAVYIDRVRSAELQGGRTEHCSQ

SEQ ID NO: 1618 - protein, 556 aa, Homo sapiens
VFAGAPHLHQPTQIPRSDSARPRSPRLPGASREPAGRRTPTPSSLCPSTRAPRPFRDPCPAGSAANLPAMETPSQRRATRSGAQASSTPLSPTRITRLQEKEDLQELNDRLAVYIDRVRSLETENAGLRLRITESEEVVSREVSGIKAAYEAELGDARKTLDSVAKERARLQLELSKVREEFKELKARNTKKEGDLIAAQARLKDLEALLNSKEAALSTALSEKRTLEGELHDLRGQVAKLEAALGEAKKQLQDEMLRRVDAENRLQTMKEELDFQKNIYSEELRETKRRHETRLVEIDNGKQREFESRLADALQELRAQHEDQVEQYKKELEKTYSAKLDNARQSAERNSNLVGAAHEELQQSRIRIDSLSAQLSQLQKQLAAKEAKLRDLEDSLARERDTSRRLLAEKEREMAEMRARMQQQLDEYQELLDIKLALDMEIHAYRKLLEGEEERLRLSPSPTSQRSRGRASSHSSQTQGGGSVTKKRKLESTESRSSFSQHARTSGNSLRTALINSTGEEVAMRKLVRSVTVVEDDEDEDGDDLLHHHHVSGSRR

SEQ ID NO: 1619 - protein, 703 aa, Homo sapiens
VFAGAPHLHQPTQIPRSDSARPRSPRLPGASREPAGRRTPTPSSLCPSTRAPRPFRDPCPAGSAANLPAMETPSQRRATRSGAQASSTPLSPTRITRLQEKEDLQELNDRLAVYIDRVRSLETENAGLRLRITESEEVVSREVSGIKAAYEAELGDARKTLDSVAKERARLQLELSKVREEFKELKARNTKKEGDLIAAQARLKDLEALLNSKEAALSTALSEKRTLEGELHDLRGQVAKLEAALGEAKKQLQDEMLRRVDAENRLQTMKEELDFQKNIYSEELRETKRRHETRLVEIDNGKQREFESRLADALQELRAQHEDQVEQYKKELEKTYSAKLDNARQSAERNSNLVGAAHEELQQSRIRIDSLSAQLSQLQKQLAAKEAKLRDLEDSLARERDTSRRLLAEKEREMAEMRARMQQQLDEYQELLDIKLALDMEIHAYRKLLEGEEERLRLSPSPTSQRSRGRASSHSSQTQGGGSVTKKRKLESTESRSSFSQHARTSGRVAVEEVDEEGKFVRLRNKSNEDQSMGNWQIKRQNGDDPLLTYRFPPKFTLKAGQVVTIWAAGAGATHSPPTDLVWKAQNTWGCGNSLRTALINSTGEGSHCSSSGDPAEYNLRSRTVLCGTCGQPADKASASGSGAQVGGPISSGSSASSVTVTRSYRSVGGSGGGSFGDNLVTRSYLLGNSSPRTQSPQNCSIM

SEQ ID NO: 1620 - protein, 733 aa, Homo sapiens
VFAGAPHLHQPTQIPRSDSARPRSPRLPGASREPAGRRTPTPSSLCPSTRAPRPFRDPCPAGSAANLPAMETPSQRRATRSGAQASSTPLSPTRITRLQEKEDLQELNDRLAVYIDRVRSLETENAGLRLRITESEEVVSREVSGIKAAYEAELGDARKTLDSVAKERARLQLELSKVREEFKELKARNTKKEGDLIAAQARLKDLEALLNSKEAALSTALSEKRTLEGELHDLRGQVAKLEAALGEAKKQLQDEMLRRVDAENRLQTMKEELDFQKNIYSEELRETKRRHETRLVEIDNGKQREFESRLADALQELRAQHEDQVEQYKKELEKTYSAKLDNARQSAERNSNLVGAAHEELQQSRIRIDSLSAQLSQLQKQLAAKEAKLRDLEDSLARERDTSRRLLAEKEREMAEMRARMQQQLDEYQELLDIKLALDMEIHAYRKLLEGEEERLRLSPSPTSQRSRGRASSHSSQTQGGGSVTKKRKLESTESRSSFSQHARTSGRVAVEEVDEEGKFVRLRNKSNEDQSMGNWQIKRQNGDDPLLTYRFPPKFTLKAGQVVTIWAAGAGATHSPPTDLVWKAQNTWGCGNSLRTALINSTGEEVAMRKLVRSVTVVEDDEDEDGDDLLHHHHGSHCSSSGDPAEYNLRSRTVLCGTCGQPADKASASGSGAQVGGPISSGSSASSVTVTRSYRSVGGSGGGSFGDNLVTRSYLLGNSSPRTQSPQNCSIM

SEQ ID NO: 1621 - protein, 657 aa, Homo sapiens
LPGASREPAGRRTPTPSSLCPSTRAPRPFRDPCPAGSAANLPAMETPSQRRATRSGAQASSTPLSPTRITRLQEKEDLQELNDRLAVYIDRVRSLETENAGLRLRITESEEVVSREVSGIKAAYEAELGDARKTLDSVAKERARLQLELSKVREEFKELKARNTKKEGDLIAAQARLKDLEALLNSKEAALSTALSEKRTLEGELHDLRGQVAKLEAALGEAKKQLQDEMLRRVDAENRLQTMKEELDFQKNIYSEELRETKRRHETRLVEIDNGKQREFESRLADALQELRAQHEDQVEQYKKELEKTYSAKLDNARQSAERNSNLVGAAHEELQQSRIRIDSLSAQLSQLQKQLAAKEAKLRDLEDSLARERDTSRRLLAEKEREMAEMRARMQQQLDEYQELLDIKLALDMEIHAYRKLLEGEEERLRLSPSPTSQRSRGRASSHSSQTQGGGSVTKKRKLESTESRSSFSQHARTSGRVAVEEVDEEGKFVRLRNKSNEDQSMGNWQIKRQNGDDPLLTYRFPPKFTLKAGQVVTIWAAGAGATHSPPTDLVWKAQNTWGCGNSLRTALINSTGEEVAMRKLVRSVTVVEDDEDEDGDDLLHHHHGSHCSSSGDPAEYNLRSRTVLCGTCGQPADKASASGSGAQSPQNCSIM

SEQ ID NO: 1622 - protein, 577 aa, Homo sapiens
LGHIWRLKAGAQMDLEAWDPHLEPDAEAMVDGNTKKEGDLIAAQARLKDLEALLNSKEAALSTALSEKRTLEGELHDLRGQVAKLEAALGEAKKQLQDEMLRRVDAENRLQTMKEELDFQKNIYSEELRETKRRHETRLVEIDNGKQREFESRLADALQELRAQHEDQVEQYKKELEKTYSAKLDNARQSAERNSNLVGAAHEELQQSRIRIDSLSAQLSQLQKQLAAKEAKLRDLEDSLARERDTSRRLLAEKEREMAEMRARMQQQLDEYQELLDIKLALDMEIHAYRKLLEGEEERLRLSPSPTSQRSRGRASSHSSQTQGGGSVTKKRKLESTESRSSFSQHARTSGRVAVEEVDEEGKFVRLRNKSNEDQSMGNWQIKRQNGDDPLLTYRFPPKFTLKAGQVVTIWAAGAGATHSPPTDLVWKAQNTWGCGNSLRTALINSTGEEVAMRKLVRSVTVVEDDEDEDGDDLLHHHHGSHCSSSGDPAEYNLRSRTVLCGTCGQPADKASASGSGAQVGGPISSGSSASSVTVTRSYRSVGGSGGGSFGDNLVTRSYLLGNSSPRTQSPQNCSIM

SEQ ID NO: 1623 - protein, 126 aa, Homo sapiens [sequence omitted]

SEQ ID NO: 1624 - protein, 248 aa, Homo sapiens
LPRPGEHTQATLPLPPLLSQESAACPPSPHHSLCLTPPTGDERRALSFFHQKGLQDFDTLLLSGDGNTLYVGAREAILALDIQDPGVPRLKNMIPWPASDRKKSECAFKKKSNETQCFNFIRVLVSYNVTHLYTCGTFAFSPACTFIVSSLVPSAQAPKHPFSHLPTTFLCSSGKLWPSRCRTLMNFLAPDQFPSMSLSLPSSSPSFPRCETLAFWPPSLSPHLGTSRFLPVAHLGGQGHGGKRPKPL

SEQ ID NO: 1625 - protein, 193 aa, Homo sapiens
LSGSLSPEGSAGSPSSGYPALHRVAMMGHRPVLVLSQNTKRESGRKVQSGNINAAKTIADIIRTCLGPKSMMKMLLDPMGGIVMTNDGNAILREIQVQHPAAKSMIEISRTQDEEVGDGTTSVIILESHSVTMLECGGAILAHCNLCLPGSSDSPASASQVAGTIVTCHHAQLIFVFLVETGFHHVGQMVSIS

SEQ ID NO: 1626 - protein, 34 aa, Homo sapiens
LRRQRFLGFCLVLSLQKVLPVPPALGTRLCIASP

SEQ ID NO: 1627 - protein, 816 aa, Homo sapiens
MSGEAWQLQLGAHRRLPRLSEAGAAAMLRGGRRGQLGWHSWAAGPGSLLAWLILASAGAAPCPDACCPHGSSGLRCTRDGALDSLHHLPGAENLTELYIENQQHLQHLELRDLRGLGELRNLTIVKSGLRFVAPDAFHFTPRLSRLNLSFNALESLSWKTVQGLSLQELVLSGNPLHCSCALRWLQRWEEEGLGGVPEQKLQCHGQGPLAHMPNASCGVPTLKVQVPNASVDVGDDVLLRCQVEGRGLEQAGWILTELEQSATVMKSGGLPSLGLTLANVTSDLNRKNVTCWAENDVGRAEVSVQVNVSFPASVQLHTAVEMHHWCIPFSVDGQPAPSLRWLFNGSVLNETSFIFTEFLEPAANETVRHGCLRLNQPTHVNNGNYTLLAANPFGQASASIMAAFMDNPFEFNPEDPIPDTNSTSGDPVEKKDETPFGVSVAVGLAVFACLFLSTLLLVLNKCGRRNKFGINRPAVLAPEDGLAMSLHFMTLGGSSLSPTEGKGSGLQGHIIENPQYFSDACVHHIKRRDIVLKWELGEGAFGKVFLAECHNLLPEQDKMLVAVKALKEASESARQDFQREAELLTMLQHQHIVRFFGVCTEGRPLLMVFEYMRHGDLNRFLRSHGPDAKLLAGGEDVAPGPLGLGQLLAVASQVAAGMVYLAGLHFVHRDLATRNCLVGQGLVVKIGDFGMSRDIYSTDYYRVGGRTMLPIRWMPPESILYRKFTTESDVWSFGVVLWEIFTYGKQPWYQLSNTEAIDCITQGRELERPRACPPEVYAIMRGCWQREPQQRHSIKDVHARLQALAQAPPVYLDVLG

SEQ ID NO: 1628 - protein, 807 aa, Homo sapiens
LPRLSEAGAAAMLRGGRRGQLGWHSWAAGPGSLLAWLILASAGAAPCPDACCPHGSSGLRCTRDGALDSLHHLPGAENLTELYIENQQHLQHLELRDLRGLGELRNLTIVKSGLRFVAPDAFHFTPRLSRLNLSFNALESLSWKTVQGLSLQELVLSGNPLHCSCALRWLQRWEEEGLGGVPEQKLQCHGQGPLAHMPNASCGVPTLKVQVPNASVDVGDDVLLRCQVEGRGLEQAGWILTELEQSATVMKSGGLPSLGLTLANVTSDLNRKNVTCWAENDVGRAEVSVQVNVSFPASVQLHTAVEMHHWCIPFSVDGQPAPSLRWLFNGSVLNETSFIFTEFLEPAANETVRHGCLRLNQPTHVNNGNYTLLAANPFGQASASIMAAFMDNPFEFNPEDPIPVSFSPVDTNSTSGDPVEKKDETPFGVSVAVGLAVFACLFLSTLLLVLNKCGRRNKFGINRPAVLAPEDGLAMSLHFMTLGGSSLSPTEGKGSGLQGHIIENPQYFSDACVHHIKRRDIVLKWELGEGAFGKVFLAECHNLLPEQDKMLVAVKALKEASESARQDFQREAELLTMLQHQHIVRFFGVCTEGRPLLMVFEYMRHGDLNRFLRSHGPDAKLLAGGEDVAPGPLGLGQLLAVASQVAAGMVYLAGLHFVHRDLATRNCLVGQGLVVKIGDFGMSRDIYSTDYYRVGGRTMLPIRWMPPESILYRKFTTESDVWSFGVVLWEIFTYGKQPWYQLSNTEAIDCITQGRELERPRACPPEVYAIMRGCWQREPQQRHSIKDVHARLQALAQAPPVYLDVLG

SEQ ID NO: 1629 - protein, 804 aa, Homo sapiens
LPRLSEAGAAAMLRGGRRGQLGWHSWAAGPGSLLAWLILASAGAAPCPDACCPHGSSGLRCTRDGALDSLHHLPGAENLTELYIENQQHLQHLELRDLRGLGELRNLTIVKSGLRFVAPDAFHFTPRLSRLNLSFNALESLSWKTVQGLSLQELVLSGNPLHCSCALRWLQRWEEEGLGGVPEQKLQCHGQGPLAHMPNASCGVPTLKVQVPNASVDVGDDVLLRCQVEGRGLEQAGWILTELEQSATVMKSGGLPSLGLTLANVTSDLNRKNVTCWAENDVGRAEVSVQVNVSFPASVQLHTAVEMHHWCIPFSVDGQPAPSLRWLFNGSVLNETSFIFTEFLEPAANETVRHGCLRLNQPTHVNNGNYTLLAANPFGQASASIMAAFMDNPFEFNPEDPIPDTNSTSGDPVEKKDETPFGVSVAVGLAVFACLFLSTLLLVLNKCGRRNKFGINRPAVLAPEDGLAMSLHFMTLGGSSLSPTEGKGSGLQGHIIENPQYFSDASPSGVHHIKRRDIVLKWELGEGAFGKVFLAECHNLLPEQDKMLVAVKALKEASESARQDFQREAELLTMLQHQHIVRFFGVCTEGRPLLMVFEYMRHGDLNRFLRSHGPDAKLLAGGEDVAPGPLGLGQLLAVASQVAAGMVYLAGLHFVHRDLATRNCLVGQGLVVKIGDFGMSRDIYSTDYYRVGGRTMLPIRWMPPESILYRKFTTESDVWSFGVVLWEIFTYGKQPWYQLSNTEAIDCITQGRELERPRACPPEVYAIMRGCWQREPQQRHSIKDVHARLQALAQAPPVYLDVLG

SEQ ID NO: 1630 - protein, 120 aa, Homo sapiens
MLRGGRRGQLGWHSWAAGPGSLLAWLILASAGAAPCPDACCPHGSSGLRCTRDGALDSLHHLPGAENLTELYIENQQHLQHLELRDLRGLGELRNLTIVKSGLRFVAPDAFHFTPRLSRL

SEQ ID NO: 1631 - protein, 744 aa, Homo sapiens
VPMLLWLLLLILTPGREQSGVAPKAVLLLNPPWSTAFKGEKVALICSSISHSLAQGDTYWYHDEKLLKIKHDKIQITEPGNYQCKTRGSSLSDAVHVEFSPDWLILQALHPVFEGDNVILRCQGKDNKNTHQKVYYKDGKQLPNSYNLEKITVNSVSRDNSKYHCTAYRKFYILDIEVTSKPLNIQVQELFLHPVLRASSSTPIEGSPMTLTCETQLSPQRPDVQLQFSLFRDSQTLGLGWSRSPRLQIPAMWTEDSGSYWCEVETVTHSIKKRSLRSQIRVQRVPVSNVNLEIRPTGGQLIEGENMVLICSVAQGSGTVTFSWHKEGRVRSLGRKTQRSLLAELHVLTVKESDAGRYYCAADNVHSPILSTWIRVTVRIPVSHPVLTFRAPRAHTVVGDLLELHCESLRGSPPILYRFYHEDVTLGNSSAPSGGGASFNLSLTAEHSGNYSCDADNGLGAQHSHGVSLRVTVPVSRPVLTLRAPGAQAVVGDLLELHCESLRGSFPILYWFYHEDDTLGNISAHSGGGASFNLSLTTEHSGNYSCEADNGLGAQHSKVVTLNVTGTSRNRTGLTAAGITGLVLSILVLAAAAALLHYARARRKPGGLSATGTSSHSPSECQEPSSSRPSRIDPQEPTHSKPLAPMELEPMYSNVNPGDSNPIYSQIWSIQHTKENSANCPMMHQEHEELTVLYSELKKTHPDDSAGEASSRGRAHEEDDEENYENILNPRKNKVQDFPCLCNT

SEQ ID NO: 1632 - protein, 641 aa, Homo sapiens
VPMLLWLLLLILTPGREQSGVAPKAVLLLNPPWSTAFKGEKVALICSSISHSLAQGDTYWYHDEKLLKIKHDKIQITEPGNYQCKTRGSSLSDAVHVEFSPDWLILQALHPVFEGDNVILRCQGKDNKNTHQKVYYKDGKQLPNSYNLEKITVNSVSRDNSKYHCTAYRKFYILDIEVTSKPLNIQVQGVPVSNVNLEIRPTGGQLIEGENMVLICSVAQGSGTVTFSWHKEGRVRSLGRKTQRSLLAELHVLTVKESDAGRYYCAADNVHSPILSTWIRVTVRIPVSHPVLTFRAPRAHTVVGDLLELHCESLRGSPPILYRFYHEDVTLGNSSAPSGGGASFNLSLTAEHSGNYSCDADNGLGAQHSHGVSLRVTVPVSRPVLTLRAPGAQAVVGDLLELHCESLRGSFPILYWFYHEDDTLGNISAHSGGGASFNLSLTTEHSGNYSCEADNGLGAQHSKVVTLNVTGTSRNRTGLTAAGITGLVLSILVLAAAAALLHYARARRKPGGLSATGTSSHSPSECQEPSSSRPSRIDPQEPTHSKPLAPMELEPMYSNVNPGDSNPIYSQIWSIQHTKENSANCPMMHQEHEELTVLYSELKKTHPDDSAGEASSRGRAHEEDDEENYENVPRVLLASDH

SEQ ID NO: 1633 - protein, 742 aa, Homo sapiens
VPMLLWLLLLILTPGREQSGVAPKAVLLLNPPWSTAFKGEKVALICSSISHSLAQGDTYWYHDEKLLKIKHDKIQITEPGNYQCKTRGSSLSDAVHVEFSPDWLILQALHPVFEGDNVILRCQGKDNKNTHQKVYYKDGKQLPNSYNLEKITVNSVSRDNSKYHCTAYRKFYILDIEVTSKPLNIQVQELFLHPVLRASSSTPIEGSPMTLTCETQLSPQRPDVQLQFSLFRDSQTLGLGWSRSPRLQIPAMWTEDSGSYWCEVETVTHSIKKRSLRSQIRVQRVPVSNVNLEIRPTGGQLIEGENMVLICSVAQGSGTVTFSWHKEGRVRSLGRKTQRSLLAELHVLTVKESDAGRYYCAADNVHSPILSTWIRVTVRTLLSPSVPVSHPVLTFRAPRAHTVVGDLLELHCESLRGSPPILYRFYHEDVTLGNSSAPSGGGASFNLSLTAEHSGNYSCDADNGLGAQHSHGVSLRVTVPVSRPVLTLRAPGAQAVVGDLLELHCESLRGSFPILYWFYHEDDTLGNISAHSGGGASFNLSLTTEHSGNYSCEADNGLGAQHSKVVTLNVTGTSRNRTGLTAAGITGLVLSILVLAAAAALLHYARARRKPGGLSATGTSSHSPSECQEPSSSRPSRIDPQEPTHSKPLAPMELEPMYSNVNPGDSNPIYSQIWSIQHTKENSANCPMMHQEHEELTVLYSELKKTHPDDSAGEASSRGRAHEEDDEENYENVPRVLLASDH

SEQ ID NO: 1634 - protein, 736 aa, Homo sapiens
VPMLLWLLLLILTPGREQSGVAPKAVLLLNPPWSTAFKGEKVALICSSISHSLAQGDTYWYHDEKLLKIKHDKIQITEPGNYQCKTRGSSLSDAVHVEFSPDWLILQALHPVFEGDNVILRCQGKDNKNTHQKVYYKDGKQLPNSYNLEKITVNSVSRDNSKYHCTAYRKFYILDIEVTSKPLNIQVQELFLHPVLRASSSTPIEGSPMTLTCETQLSPQRPDVQLQFSLFRDSQTLGLGWSRSPRLQIPAMWTEDSGSYWCEVETVTHSIKKRSLRSQIRVQRVPVSNVNLEIRPTGGQLIEGENMVLICSVAQGSGTVTFSWHKEGRVRSLGRKTQRSLLAELHVLTVKESDAGRYYCAADNVHSPILSTWIRVTVRIPVSHPVLTFRAPRAHTVVGDLLELHCESLRGSPPILYRFYHEDVTLGNSSAPSGGGASFNLSLTAEHSGNYSCDADNGLGAQHSHGVSLRVTVPVSRPVLTLRAPGAQAVVGDLLELHCESLRGSFPILYWFYHEDDTLGNISAHSGGGASFNLSLTTEHSGNYSCEADNGLGAQHSKVVTLNVTGTSRNRTGLTAAGITGLVLSILVLAAAAALLHYARARRKPGGLSATGTSSHSPSECQEPSSSRPSRIDPQEPTHSKPLAPMELEPMYSNVNPGDSNPIYSQIWSIQHTKENSANCPMMHQEHEELTVLYSELKKTHPDDSAGEASSRGRAHEEDDEENYENVPRVLLASDH

SEQ ID NO: 1635 - protein, 171 aa, Homo sapiens
LVLSILVLAAAAALLHYARARRKPGGLSATGTSSHSPSECQEPSSSRPSRIDPQEPTHSKPLAPMELEPMYSNVNPGDSNPIYSQIWSIQHTKENSESNRGNSQEIKQIKKIGLEYFFYVGLEESSRGNSKRSSKSRRLVWNAVCVRCKLEYIAHSLILFFATPTQQLIVQ

SEQ ID NO: 1636 - protein, 201 aa, Homo sapiens
VPMLLWLLLLILTPGREQSGVAPKAVLLLNPPWSTAFKGEKVALICSSISHSLAQGDTYWYHDEKLLKIKHDKIQITEPGNYQCKTRGSSLSDAVHVEFSPDWLILQALHPVFEGDNVILRCQGKDNKNTHQKVYYKDGKQLPNSYNLEKITVNSVSRDNSKYHCTAYRKFYILDIEVTSKPLNIQVQEARCPAAILPLQR

SEQ ID NO: 1637 - protein, 191 aa, Homo sapiens
VPMLLWLLLLILTPGREQSGVAPKAVLLLNPPWSTAFKGEKVALICSSISHSLAQGDTYWYHDEKLLKIKHDKIQITEPGNYQCKTRGSSLSDAVHVEFSPDWLILQALHPVFEGDNVILRCQGKDNKNTHQKVYYKDGKQLPNSYNLEKITVNSVSRDNSKYHCTAYRKFYILDIEVTSKPLNIQVQGNG

SEQ ID NO: 1638 - protein, 260 aa, Homo sapiens
MKKMAPAMESPTLLCVALLFFAPDGVLAVPQKPKVSLNPPWNRIFKGENVTLTCNGNNFFEVSSTKWFHNGSLSEETNSSLNIVNAKFEDSGEYKCQHQQVNESEPVYLEVFSDWLLLQASAEVVMEGQPLFLRCHGWRNWDVYKVIYYKDGEALKYWYENHNISITNATVEDSGTYYCTGKVWQLDYESEPLNITVIKAPREKYWLQFFIPLLVVILFAVDTGLFISTQQQVTFLLKIKRTRKGFRLLNPHPKPNPKNN

SEQ ID NO: 1639 - protein, 227 aa, Homo sapiens
MKKMAPAMESPTLLCVALLFFAPDGVLAVSSTKWFHNGSLSEETNSSLNIVNAKFEDSGEYKCQHQQVNESEPVYLEVFSDWLLLQASAEVVMEGQPLFLRCHGWRNWDVYKVIYYKDGEALKYWYENHNISITNATVEDSGTYYCTGKVWQLDYESEPLNITVIKAPREKYWLQFFIPLLVVILFAVDTGLFISTQQQVTFLLKIKRTRKGFRLLNPHPKPNPKNN

SEQ ID NO: 1640 - protein, 236 aa, Homo sapiens
LTASRSQAPVFTAESMLWLFQSLLFVFCFGPGQLRNIQVTNHSQLFQNMTCELHLTCSVEDADDNVSFRWEALGNTLSSQPNLTVSWDPRISSEQDYTCIAENAVSNLSFSVSAQKLCEDVKIQYTDTKMILFMVSGICIVFGFIILLLLVLRKRRDSLSLSTQRTQGPAESARNLEYVSVSPTNNTVYASVTHSNRETEIWTPRENDTITIYSTINHSKESKPTFSRATALDNVV

SEQ ID NO: 1641 - protein, 33 aa, Homo sapiens
MAGSPTCLTLIYILWQLTGQEETRERGKNGSGN

SEQ ID NO: 1642 - protein, 75 aa, Homo sapiens
LLLEYIEEKKRVDICRETPNICPHSGENTEYDTIPHTNVSPFSSFLRTDPVSEALLVRFFHGFGQHGNEEGSEDI

SEQ ID NO: 1643 - protein, 218 aa, Homo sapiens
LQEPQVTMKSVKVSENFSCNITLMCSVKGAEKSVLYSWTPREPHASESNGGSILTVSRTPCDPDLPYICTAQNPVSQRSSLPVHVGQFCTDPGASRGGTTGETVVGVLGEPVTLPLALPACRDTEKVVWLFNTSIISKEREEAATADPLIKSRDPYKNRVWVSSQDCSLKISQLKIEDAGPYHAYVCSEASSVTSMTHVTLLIYRESLGRAPITRFLL

SEQ ID NO: 1644 - protein, 40 aa, Homo sapiens
LHSAVRTADLQPKMIPAVVLLLLLLVEQADPSAKGSYNQL

SEQ ID NO: 1645 - protein, 375 aa, Homo sapiens
LVLGGSKSRRWGKHPGMAEGTLWQILCVSSDAQPQTFEGVKGADPPTLPPGSFLPGPVLWWGSLARLQTEKSDEVSRKGNWWVTEMGGGAGERLFTSSCLVGLVPLGLRISLVTCPLQCGIMWQLLLPTALLLLVSAGMRTEDLPKAVVFLEPQWYRVLEKDSVTLKCQGAYSPEDNSTQWFHNESLISSQASSYFIDAATVDDSGEYRCQTNLSTLSDPVQLEVHIGWLLLQAPRWVFKEEDPIHLRCHSWKNTALHKVTYLQNGKGRKYFHHNSDFYIPKATLKDSGSYFCRGLFGSKNVSSETVNITITQGLAVSTISSFFPPGYQVSFCLVMVLLFAVDTGLYFSVKTNIRSSTRDWKDHKFKWRKDPQDK

SEQ ID NO: 1646 - protein, 123 aa, Homo sapiens
LLLPTALLLLVSAGMRTEDLPKAVVFLEPQWYRVLEKDSVTLKCQGAYSPEDNSTQWFHNESLISSQASSYFIDAATVDDSGEYRCQTNLSTLSDPVQLEVHIGPFPTMTSCSLFVKSDYLVT

SEQ ID NO: 1647 - protein, 182 aa, Homo sapiens
LKSVGARNPEPSPARCSGPCSLSLASPCLAWPIICSVLCRKEETVTVYPADVVLFEGILAFYSQEVRDLFQMKLFVDTDADTRLSRRVLRDISERGRDLEQILSQYITFVKPAFEEFCLPTKKYADVIIPRGADNLVAINLIVQHIQDILNGGPSKRQTNGCLNGYTPSRKRQASESSSRPH

SEQ ID NO: 1648 - protein, 269 aa, Homo sapiens
VFNFIGYSFFLIVFVPMIENSSWSMTFEERENRRLQEASMRLEQENDDLAHELVTSKIALRNDLDQAEDKADVLNKELLLTKQRLVETEEEKRKQEEETAQLKEVFRKQLEKAEYEIKKTTAIIAEYKQICSQLSTRLEKQQAASKEELEVVKGKMMACKHCSDIFSKEGALKLAATGREDQGIETDDEKDSLKKQLREMELELAQTKLQLVEAKCKIQELEHQRGALMNEIQAAKNSWFSKTLNSIKTATGTQPLQPAPVTQPPKEST

SEQ ID NO: 1649 - protein, 70 aa, Homo sapiens
LLCILEKFLCDTEKSASSNVRLKTNKEVPGLVHQPRANMHISESQQEFFRMLDEKIEKGRDYCSEEEDIT

SEQ ID NO: 1650 - protein, 1365 aa, Homo sapiens
LKTTMAWKTLPIYLLLLLSVFVIQQVSSQDLSSCAGRCGEGYSRDATCNCDYNCQHYMECCPDFKRVCTAELSCKGRCFESFERGRECDCDAQCKKYDKCCPDYESFCAEVHNPTSPPSSKKAPPPSGASQTIKSTTKRSPKPPNKKKTKKVIESEEITEVKDNKKNRTKKKPTPKPPVVDEAGSGLDNGDFKVTTPDTSTTQHNKVSTSPKITTAKPINPRPSLPPNSDTSKETSLTVNKETTVETKETTTTNKQTSTDGKEKTTSAKETQSIEKTSAKDLAPTSKVLAKPTPKAETTTKGPALTTPKEPTPTTPKEPASTTPKEPTPTTIKSAPTTPKEPAPTTTKSAPTTPKEPAPTTTKEPAPTTPKEPAPTTTKEPAPTTTKSAPTTPKEPAPTTPKKPAPTTPKEPAPTTPKEPTPTTPKEPAPTTKEPAPTTPKEPAPTAPKKPAPTTPKEPAPTTPKEPAPTTTKEPSPTTPKEPAPTTTKSAPTTTKEPAPTTTKSAPTTPKEPSPTTTKEPAPTTPKEPAPTTPKKPAPTTPKEPAPTTPKEPAPTTTKKPAPTTPKEPAPTTPKETAPTTPKKLTPTTPEKLAPTTPEKPAPTTPEELAPTTPEEPTPTTPEEPAPTTPKAAAPNTPKEPAPTTPKEPAPTTPKEPAPTTPKETAPTTPKGTAPTTLKEPAPTTPKKPAPKELAPTTTKEPTSTTSDKPAPTTPKGTAPTTPKEPAPTTPKEPAPTTPKGTAPTTLKEPAPTTPKKPAPKELAPTTTKGPTSTTSDKPAPTTPKETAPTTPKEPAPTTPKKPAPTTPETPPPTTSEVSTPTTTKEPTTIHKSPDESTPELSAEPTPKALENSPKEPGVPTTKTPAATKPEMTTTAKDKTTERDLRTTPETTTAAPKMTKETATTTEKTTESKITATTTQVTSTTTQDTTPFKITTLKTTTLAPKVTTTKKTITTTEIMNKPEETAKPKDRATNSKATTPKPQKPTKAPKKPTSTKKPKTMPRVRKPKTTPTPRKMTSTMPELNPTSRIAEAMLQTTTRPNQTPNSKLVEVNPKSEDAGGAEGETPHMLLRPHVFMPEVTPDMDYLPRVPNQGIIINPMLSDETNICNGKPVDGLTTLRNGTLVAFRGHYFWMLSPFSPPSPARRITEVWGIPSPIDTVFTRCNCEGKTFFFKDSQYWRFTNDIKDAGYPKPIFKGFGGLTGQIVAALSTAKYKNWPESVYFFKRGGSIQQYIYKQEPVQKCPGRRPALNYPVYGETTQVRRRRFERAIGPSQTHTIRIQYSPARLAYQDKGVLHNEVKVSILWRGLPNVVTSAISLPNIRKPDGYDYYAFSKDQYYNIDVPSRTARAITTRSGQTLSKVWYNCP

SEQ ID NO: 1651 - protein, 1408 aa, Homo sapiens
LKTTMAWKTLPIYLLLLLSVFVIQQVSSQDLSSCAGRCGEGYSRDATCNCDYNCQHYMECCPDFKRVCTAELSCKGRCFESFERGRECDCDAQCKKYDKCCPDYESFCAEVHNPTSPPSSKKAPPPSGASQTIKSTTKRSPKPPNKKKTKKVIESEEITEEHSVSENQESSSSSSSSSSSSTIRKIKSSKNSAANRELQKKLKVKDNKKNRTKKKPTPKPPVVDEAGSGLDNGDFKVTTPDTSTTQHNKVSTSPKITTAKPINPRPSLPPNSDTSKETSLTVNKETTVETKETTTTNKQTSTDGKEKTTSAKETQSIEKTSAKDLAPTSKVLAKPTPKAETTTKGPALTTPKEPTPTTPKEPASTTPKEPTPTTIKSAPTTPKEPAPTTTKSAPTTPKEPAPTTTKEPAPTTPKEPAPTTTKEPAPTTTKSAPTTPKEPAPTTPKKPAPTTPKEPAPTTPKEPTPTTPKEPAPTTKEPAPTTPKEPAPTAPKKPAPTTPKEPAPTTPKEPAPTTTKEPSPTTPKEPAPTTTKSAPTTTKEPAPTTTKSAPTTPKEPSPTTTKEPAPTTPKEPAPTTPKKPAPTTPKEPAPTTPKEPAPTTTKKPAPTTPKEPAPTTPKETAPTTPKKLTPTTPEKLAPTTPEKPAPTTPEELAPTTPEEPTPTTPEEPAPTTPKAAAPNTPKEPAPTTPKEPAPTTPKEPAPTTPKETAPTTPKGTAPTTLKEPAPTTPKKPAPKELAPTTTKEPTSTTSDKPAPTTPKGTAPTTPKEPAPTTPKEPAPTTPKGTAPTTLKEPAPTTPKKPAPKELAPTTTKGPTSTTSDKPAPTTPKETAPTTPKEPAPTTPKKPAPTTPETPPPTTSEVSTPTTTKEPTTIHKSPDESTPELSAEPTPKALENSPKEPGVPTTKTPAATKPEMTTTAKDKTTERDLRTTPETTTAAPKMTKETATTTEKTTESKITATTTQVTSTTTQDTTPFKITTLKTTTLAPKVTTTKKTITTTEIMNKPEETAKPKDRATNSKATTPKPQKPTKAPKKPTSTKKPKTMPRVRKPKTTPTPRKMTSTMPELNPTSRIAEAMLQTTTRPNQTPNSKLVEVNPKSEDAGGAEGETPHMLLRPHVFMPEVTPDMDYLPRVPNQGIIINPMLSDETNICNGKPVDGLTTLRNGTLVAFRGHYFWMLSPFSPPSPARRITEVWGIPSPIDTVFTRCNCEGKTFFFKDSQYWRFTNDIKDAGYPKPIFKGFGGLTGQIVAALSTAKYKNWPESVYFFKRGGSIQQYIYKQEPVQKCPGRRPALNYPVYGETTQVRRRRFERAIGPSQTHTIRIQYSPARLAYQDKGVLHNEVKVSILWRGLPNVVTSAISLPNIRKPDGYDYYAFSKDQYYNIDVPSRTARAITTRSGQTLSKVWYNCP

SEQ ID NO: 1652 - protein, 1367 aa, Homo sapiens
LKTTMAWKTLPIYLLLLLSVFVIQQVSSQELSCKGRCFESFERGRECDCDAQCKKYDKCCPDYESFCAEVHNPTSPPSSKKAPPPSGASQTIKSTTKRSPKPPNKKKTKKVIESEEITEEHSVSENQESSSSSSSSSSSSTIRKIKSSKNSAANRELQKKLKVKDNKKNRTKKKPTPKPPVVDEAGSGLDNGDFKVTTPDTSTTQHNKVSTSPKITTAKPINPRPSLPPNSDTSKETSLTVNKETTVETKETTTTNKQTSTDGKEKTTSAKETQSIEKTSAKDLAPTSKVLAKPTPKAETTTKGPALTTPKEPTPTTPKEPASTTPKEPTPTTIKSAPTTPKEPAPTTTKSAPTTPKEPAPTTTKEPAPTTPKEPAPTTTKEPAPTTTKSAPTTPKEPAPTTPKKPAPTTPKEPAPTTPKEPTPTTPKEPAPTTKEPAPTTPKEPAPTAPKKPAPTTPKEPAPTTPKEPAPTTTKEPSPTTPKEPAPTTTKSAPTTTKEPAPTTTKSAPTTPKEPSPTTTKEPAPTTPKEPAPTTPKKPAPTTPKEPAPTTPKEPAPTTTKKPAPTTPKEPAPTTPKETAPTTPKKLTPTTPEKLAPTTPEKPAPTTPEELAPTTPEEPTPTTPEEPAPTTPKAAAPNTPKEPAPTTPKEPAPTTPKEPAPTTPKETAPTTPKGTAPTTLKEPAPTTPKKPAPKELAPTTTKEPTSTTSDKPAPTTPKGTAPTTPKEPAPTTPKEPAPTTPKGTAPTTLKEPAPTTPKKPAPKELAPTTTKGPTSTTSDKPAPTTPKETAPTTPKEPAPTTPKKPAPTTPETPPPTTSEVSTPTTTKEPTTIHKSPDESTPELSAEPTPKALENSPKEPGVPTTKTPAATKPEMTTTAKDKTTERDLRTTPETTTAAPKMTKETATTTEKTTESKITATTTQVTSTTTQDTTPFKITTLKTTTLAPKVTTTKKTITTTEIMNKPEETAKPKDRATNSKATTPKPQKPTKAPKKPTSTKKPKTMPRVRKPKTTPTPRKMTSTMPELNPTSRIAEAMLQTTTRPNQTPNSKLVEVNPKSEDAGGAEGETPHMLLRPHVFMPEVTPDMDYLPRVPNQGIIINPMLSDETNICNGKPVDGLTTLRNGTLVAFRGHYFWMLSPFSPPSPARRITEVWGIPSPIDTVFTRCNCEGKTFFFKDSQYWRFTNDIKDAGYPKPIFKGFGGLTGQIVAALSTAKYKNWPESVYFFKRGGSIQQYIYKQEPVQKCPGRRPALNYPVYGETTQVRRRRFERAIGPSQTHTIRIQYSPARLAYQDKGVLHNEVKVSILWRGLPNVVTSAISLPNIRKPDGYDYYAFSKDQYYNIDVPSRTARAITTRSGQTLSKVWYNCP

SEQ ID NO: 1653 - protein, 1315 aa, Homo sapiens
LKTTMAWKTLPIYLLLLLSVFVIQQVSSQDLSSCAGRCGEGYSRDATCNCDYNCQHYMECCPDFKRVCTAELSCKGRCFESFERGRECDCDAQCKKYDKCCPDYESFCAEVKDNKKNRTKKKPTPKPPVVDEAGSGLDNGDFKVTTPDTSTTQHNKVSTSPKITTAKPINPRPSLPPNSDTSKETSLTVNKETTVETKETTTTNKQTSTDGKEKTTSAKETQSIEKTSAKDLAPTSKVLAKPTPKAETTTKGPALTTPKEPTPTTPKEPASTTPKEPTPTTIKSAPTTPKEPAPTTTKSAPTTPKEPAPTTTKEPAPTTPKEPAPTTTKEPAPTTTKSAPTTPKEPAPTTPKKPAPTTPKEPAPTTPKEPTPTTPKEPAPTTKEPAPTTPKEPAPTAPKKPAPTTPKEPAPTTPKEPAPTTTKEPSPTTPKEPAPTTTKSAPTTTKEPAPTTTKSAPTTPKEPSPTTTKEPAPTTPKEPAPTTPKKPAPTTPKEPAPTTPKEPAPTTTKKPAPTTPKEPAPTTPKETAPTTPKKLTPTTPEKLAPTTPEKPAPTTPEELAPTTPEEPTPTTPEEPAPTTPKAAAPNTPKEPAPTTPKEPAPTTPKEPAPTTPKETAPTTPKGTAPTTLKEPAPTTPKKPAPKELAPTTTKEPTSTTSDKPAPTTPKGTAPTTPKEPAPTTPKEPAPTTPKGTAPTTLKEPAPTTPKKPAPKELAPTTTKGPTSTTSDKPAPTTPKETAPTTPKEPAPTTPKKPAPTTPETPPPTTSEVSTPTTTKEPTTIHKSPDESTPELSAEPTPKALENSPKEPGVPTTKTPAATKPEMTTTAKDKTTERDLRTTPETTTAAPKMTKETATTTEKTTESKITATTTQVTSTTTQDTTPFKITTLKTTTLAPKVTTTKKTITTTEIMNKPEETAKPKDRATNSKATTPKPQKPTKAPKKPTSTKKPKTMPRVRKPKTTPTPRKMTSTMPELNPTSRIAEAMLQTTTRPNQTPNSKLVEVNPKSEDAGGAEGETPHMLLRPHVFMPEVTPDMDYLPRVPNQGIIINPMLSDETNICNGKPVDGLTTLRNGTLVAFRGHYFWMLSPFSPPSPARRITEVWGIPSPIDTVFTRCNCEGKTFFFKDSQYWRFTNDIKDAGYPKPIFKGFGGLTGQIVAALSTAKYKNWPESVYFFKRGGSIQQYIYKQEPVQKCPGRRPALNYPVYGETTQVRRRRFERAIGPSQTHTIRIQYSPARLAYQDKGVLHNEVKVSILWRGLPNVVTSAISLPNIRKPDGYDYYAFSKDQYYNIDVPSRTARAITTRSGQTLSKVWYNCP

SEQ ID NO: 1654 - protein, 791 aa, Homo sapiens
LEFNPFYLEISCKSPDVINGSPISQKIIYKENERFQYKCNMGYEYSERGDAVCTESGWRPLPSCEEKSCDNPYIPNGDYSPLRIKHRTGDEITYQCRNGFYPATRGNTAKCTSTGWIPAPRCTLKPCDYPDIKHGGLYHENMRRPYFPVAVGKYYSYYCDEHFETPSGSYWDHIHCTQDGWSPAVPCLRKCYFPYLENGYNQNHGRKFVQGKSIDVACHPGYALPKAQTTVTCMENGWSPTPRCIRVKTCSKSSIDIENGFISESQYTYALKEKAKYQCKLGYVTADGETSGSITCGKDGWSAQPTCIKSCDIPVFMNARTKNDFTWFKLNDTLDYECHDGYESNTGSTTGSIVCGYNGWSDLPICYERECELPKIDVHLVPDRKKDQYKVGEVLKFSCKPGFTIVGPNSVQCYHFGLSPDLPICKEQVQSCGPPPELLNGNVKEKTKEEYGHSEVVEYYCNPRFLMKGPNKIQCVDGEWTTLPVCIVEESTCGDIPELEHGWAQLSSPPYYYGDSVEFNCSESFTMIGHRSITCIHGVWTQLPQCVAIDKLKKCKSSNLIILEEHLKNKKEFDHNSNIRYRCRGKEGWIHTVCINGRWDPEVNCSMAQIQLCPPPPQIPNSHNMTTTLNYRDGEKVSVLCQENYLIQEGEEITCKDGRWQSIPLCVEKIPCSQPPQIEHGTINSSRSSQESYAHGTKLSYTCEGGFRISEENETTCYMGKWSSPPQCEGLPCKSPPEISHGVVAHMSDSYQYGEEVTYKCFEGFGIDGPAIAKCLGEKWSHPPSCISMVH

SEQ ID NO: 1655 - protein, 3509 aa, Homo sapiens
LRGSGQRKSRIPAPEPPRGSGARRSRRGLESAMANRRVGRGCWEVSPTERRPPAGLRGPAAEEEASSPPVLSLSHFCRSPFLCFGDVLLGASRTLSLALDNPNEEVAEVKISHFPAADLGFSVSQRCFVLQPKEKIVISVNWTPLKEGRVREIMTFLVNDVLKHQAILLGNAEEQKKKKRSLWDTIKKKKISASTSHNRRVSNIQNVNKTFSVSQKVDRVRSPLQACENLAMNEGGPPTENNSLILEENKIPISPISPAFNECHGATCLPLSVRRSTTYSSLHASENRELLNVHSANVSKVSFNEKAVTETSFNSVNVNGQRGENSKLSLTPNCSSTLNITQSQIHFLSPDSFVNNSHGANNELELVTCLSSDMFMKDNSQPVHLESTIAHEIYQKILSPDSFIKDNYGLNQDLESESVNPILSPNQFLKDNMAYMCTSQQTCKVPLSNENSQVPQSPEDWRKSEVSPRIPECQGSKSPKAIFEELVEMKSNYYSFIKQNNPKFSAVQDISSHSHNKQPKRRPILSATVTKRKATCTRENQTEINKPKAKRCLNSAVGEHEKVINNQKEKEDFHSYLPIIDPILSKSKSYKNEVTPSSTTASVARKRKSDGSMEDANVRVAITEHTEVREIKRIHFSPSEPKTSAVKKTKNVTTPISKRISNREKLNLKKKTDLSIFRTPISKTNKRTKPIIAVAQSSLTFIKPLKTDIPRHPMPFAAKNMFYDERWKEKQEQGFTWWLNFILTPDDFTVKTNISEVNAATLLLGIENQHKISVPRAPTKEEMSLRAYTARCRLNRLRRAACRLFTSEKMVKAIKKLEIEIEARRLIVRKDRHLWKDVGERQKVLNWLLSYNPLWLRIGLETTYGELISLEDNSDVTGLAMFILNRLLWNPDIAAEYRHPTVPHLYRDGHEEALSKFTLKKLLLLVCFLDYAKISRLIDHDPCLFCKDAEFKASKEILLAFSRDFLSGEGDLSRHLGLLGLPVNHVQTPFDEFDFAVTNLAVDLQCGVRLVRTMELLTQNWDLSKKLRIPAISRLQKMHNVDIVLQVLKSRGIELSDEHGNTILSKDIVDRHREKTLRLLWKIAFAFQVDISLNLDQLKEEIAFLKHTKSIKKTISLLSCHSDDLINKKKGKRDSGSFEQYSENIKLLMDWVNAVCAFYNKKVENFTVSFSDGRVLCYLIHHYHPCYVPFDAICQRTTQTVECTQTGSVVLNSSSESDDSSLDMSLKAFDHENTSELYKELLENEKKNFHLVRSAVRDLGGIPAMINHSDMSNTIPDEKVVITYLSFLCARLLDLRKEIRAARLIQTTWRKYKLKTDLKRHQEREKAARIIQLAVINFLAKQRLRKRVNAALVIQKYWRRVLAQRKLLMLKKEKLEKVQNKAASLIQGYWRRYSTRQRFLKLKYYSIILQSRIRMIIAVTSYKRYLWATVTIQRHWRAYLRRKQDQQRYEMLKSSTLIIQSMFRKWKQRKMQSQVKATVILQRAFREWHLRKQAKEENSAIIIQSWYRMHKELRKYIYIRSCVVIIQKRFRCFQAQKLYKRRKESILTIQKYYKAYLKGKIERTNYLQKRAAAIQLQAAFRRLKAHNLCRQIRAACVIQSYWRMRQDRVRFLNLKKTIIKFQAHVRKHQQRQKYKKMKKAAVIIQTHFRAYIFAMKVLASYQKTRSAVIVLQSAYRGMQARKMYIHILTSVIKIQSYYRAYVSKKEFLSLKNATIKLQSTVKMKQTRKQYLHLRAAALFIQQCYRSKKIAAQKREEYMQMRESCIKLQAFVRGYLVRKQMRLQRKAVISLQSYFRMRKARQYYLKMYKAIIVIQNYYHAYKAQVNQRKNFLQVKKAATCLQAAYRGYKVRQLIKQQSIAALKIQSAFRGYNKRVKYQSVLQSIIKIQRWYRAYKTLHDTRTHFLKTKAAVISLQSAYRGWKVRKQIRREHQAALKIQSAFRMAKAQKQFRLFKTAALVIQQNFRAWTAGRKQCMEYIELRHAVLVLQSMWKGKTLRRQLQRQHKCAIIIQSYYRMHVQQKKWKIMKKAALLIQKYYRAYSIGREQNHLYLKTKAAVVTLQSAYRGMKVRKRIKDCNKAAVTIQSKYRAYKTKKKYATYRASAIIIQRWYRGIKITNHQHKEYLNLKKTAIKIQSVYRGIRVRRHIQHMHRAATFIKAMFKMHQSRISYHTMRKAAIVIQVRCRAYYQGKMQREKYLTILKAVKVLQASFRGVRVRRTLRKMQTAATLIQSNYRRYRQQTYFNKLKKITKTVQQRYWAMKERNIQFQRYNKLRHSVIYIQAIFRGKKARRHLKMMHIAATLIQRRFRTLMMRRRFLSLKKTAILIQRKYRAHLCTKHHLQFLQVQNAVIKIQSSYRRWMIRKRMREMHRAATFIQSTFRMHRLHMRYQALKQASVVIQQQYQANRAAKLQRQHYLRQRHSAVILQAAFRGMKTRRHLKSMHSSATLIQSRFRSLLVRRRFISLKKATIFVQRKYRATICAKHKLYQFLHLRKAAITIQSSYRRLMVKKKLQEMQRAAVLIQATFRMYRTYITFQTWKHASILIQQHYRTYRAAKLQRENYIRQWHSAVVIQAAYKGMKARQLLREKHKASIVIQSTYRMYRQYCFYQKLQWATKIIQEKYRANKKKQKVFQHNELKKETCVQAGFQDMNIKKQIQEQHQAAIIIQKHCKAFKIRKHYLHLRATVVSIQRRYRKLTAVRTQAVICIQSYYRGFKVRKDIQNMHRAATLIQSFYRMHRAKVDYETKKTAIVVIQNYYRLYVRVKTERKNFLAVQKSVRTIQAAFRGMKVRQKLKNVSEEKMAAIVNQSALCCYRSKTQYEAVQSEGVMIQEWYKASGLACSQEAEYHSQSRAAVTIQKAFCRMVTRKLETQKCAALRIQFFLQMAVYRRRFVQQKRAAITLQHYFRTWQTRKQFLLYRKAAVVLQNHYRAFLSAKHQRQVYLQIRSSVIIIQARSKGFIQKRKFQEIKNSTIKIQAMWRRYRAKKYLCKVKAACKIQAWYRCWRAHKEYLAILKAVKIIQGCFYTKLERTRFLNVRASAIIIQRKWRAILPAKIAHEHFLMIKRHRAACLIQAHYRGYKGRQVFLRQKSAALIIQKYIRAREAGKHERIKYIEFKKSTVILQALVRGWLVRKRFLEQRAKIRLLHFTAAAYYHLNAVRIQRAYKLYLAVKNANKQVNSVICIQRWFRARLQEKRFIQKYHSIKKIEHEGQECLSQRNRAASVIQKAVRHFLLRKKQEKFTSGIIKIQALWRGYSWRKKNDCTKIKAIRLSLQVVNREIREENKLYKRTALALHYLLTYKHLSAILEALKHLEVVTRLSPLCCENMAQSGAISKIFVLIRSCNRSIPCMEVIRYAVQVLLNVSKYEKTTSAVYDVENCIDILLELLQIYREKPGNKVADKGGSIFTKTCCLLAILLKTTNRASDVRSRSKVVDRIYSLYKLTAHKHKMNTERILYKQKKNSSISIPFIPETPVRTRIVSRLKPDWVLRRDNMEEITNPLQAIQMVMDTLGIPY

SEQ ID NO: 1656 - protein, 1936 aa, Homo sapiens
LPLSLLPRSLPLLSPSSSVSSVLSLPLLLPRLLLLRSRPLPPPPVPADARIVHALLAGRMLGSSVKSVQPEVELSSGGGDEGADEPRGAGRKAAAADGRGMLPKRAKAPGGGGGMAKASAAELKVFKSGSVDSRVPGGPPASNLRKQKSLTNLSFLTDSEKKLQLYEPEWSDDMAKAPKGLGKVGSKGREAPLMSKTLSKSEHSLFQAKGSPAGGAKTPLAPLAPNLGKPSRIPRGPYAEVKPLSKAPEAAVSEDGKSDDELLSSKAKAQKSSGPVPSAKGQEERAFLKVDPELVVTVLGDLEQLLFSQMLDPESQRKRTVQNVLDLRQNLEETMSSLRGSQVTHSSLEMTCYDSDDANPRSVSSLSNRSSPLSWRYGQSSPRLQAGDAPSVGGSCRSEGTPAWYMHGERAHYSHTMPMRSPSKLSHISRLELVESLDSDEVDLKSGYMSDSDLMGKTMTEDDDITTGWDESSSISSGLSDASDNLSSEEFNASSSLNSLPSTPTASRRNSTIVLRTDSEKRSLAESGLSWFSESEEKAPKKLEYDSGSLKMEPGTSKWRRERPESCDDSSKGGELKKPISLGHPGSLKKGKTPPVAVTSPITHTAQSALKVAGKPEGKATDKGKLAVKNTGLQRSSSDAGRDRLSDAKKPPSGIARPSTSGSFGYKKPPPATGTATVMQTGGSATLSKIQKSSGIPVKPVNGRKTSLDVSNSAEPGFLAPGARSNIQYRSLPRPAKSSSMSVTGGRGGPRPVSSSIDPSLLSTKQGGLTPSRLKEPTKVASGRTTPAPVNQTDREKEKAKAKAVALDSDNISLKSIGSPESTPKNQASHPTATKLAELPPTPLRATAKSFVKPPSLANLDKVNSNSLDLPSSSDTTHASKVPDLHATSSASGGPLPSCFTPSPAPILNINSASFSQGLELMSGFSVPKETRMYPKLSGLHRSMESLQMPMSLPSAFPSSTPVPTPPAPPAAPTEEETEELTWSGSPRAGQLDSNQRDRNTLPKKGLRYQLQSQEETKERRHSHTIGGLPESDDQSELPSPPALPMSLSAKGQLTNIVSPTAATTPRITRSNSIPTHEAAFELYSGSQMGSTLSLAERPKGMIRSGSFRDPTDDVHGSVLSLASSASSTYSSAEERMQSEQIRKLRRELESSQEKVATLTSQLSANANLVAAFEQSLVNMTSRLRHLAETAEEKDTELLDLRETIDFLKKKNSEAQAVIQGALNASETTPKELRIKRQNSSDSISSLNSITSHSSIGSSKDADAKKKKKKSWVYELRSSFNKAFSIKKGPKSASSYSDIEEIATPDSSAPSSPKLQHGSTETASPSIKSSTSSSVGTDVTEGPAHPAPHTRLFHANEEEEPEKKEVSELRSELWEKEMKLTDIRLEALNSAHQLDQLRETMHNMQLEVDLLKAENDRLKVAPGPSSGSTPGQVPGSSALSSPRRSLGLALTHSFGPSLADTDLSPMDGISTCGPKEEVTLRVVVRMPPQHIIKGDLKQQEFFLGCSKVSGKVDWKMLDEAVFQVFKDYISKMDPASTLGLSTESIHGYSISHVKRVLDAEPPEMPPCRRGVNNISVSLKGLKEKCVDSLVFETLIPKPMMQHYISLLLKHRRLVLSGPSGTGKTYLTNRLAEYLVERSGREVTEGIVSTFNMHQQSCKDLQLYLSNLANQIDRETGIGDVPLVILLDDLSEAGSISELVNGALTCKYHKCPYIIGTTNQPVKMTPNHGLHLSFRMLTFSNNVEPANGFLVRYLRRKLVESDSDINANKEELLRVLDWVPKLWYHLHTFLEKHSTSDFLIGPCFFLSCPIGIEDFRTWFIDLWNNSIIPYLQEGAKDGIKVHGQKAAWEDPVEWVRDTLPWPSAQQDQSKLYHLPPPTVGPHSIASPPEDRTVKDSTPSSLDSDPLMAMLLKLQEAANYIESPDRETILDPNLQATL

SEQ ID NO: 1657 - protein, 105 aa, Homo sapiens
LSQWLWCLFIGIGELLWGQFISAIPTRSLKFLKEAGHGTTKEEITKDAEGLDEIDHAEMELRRGQILWFRGLNRIQTQHLLQDSDLLPDKEEAIISSSLFPSCNF

SEQ ID NO: 1658 - protein, 139 aa, Homo sapiens
LDGPCTLEGTMDFWLWPLYFLPVSGALRILPEVKVEGELGGSVTIKCPLPEMHVRIYLCREMAGSGTCGTVVSTTNFIKAEYKGRVTLKQYPRKNLFLVEVTQLTESDSGVYACGAGMNTDRGKTQKVTLNVHSGRFLR

SEQ ID NO: 1659 - protein, 558 aa, Homo sapiens
LLAVVVLLALPVAWGQCNAPEWLPFARPTNLTDEFEFPIGTYLNYECRPGYSGRPFSIICLKNSVWTGAKDRCRRKSCRNPPDPVNGMVHVIKGIQFGSQIKYSCTKGYRLIGSSSATCIISGDTVIWDNETPICDRIPCGLPPTITNGDFISTNRENFHYGSVVTYRCNPGSGGRKVFELVGEPSIYCTSNDDQVGIWSGPAPQCIIPNKCTPPNVENGILVSDNRSLFSLNEVVEFRCQPGFVMKGPRRVKCQALNKWEPELPSCSRVCQPPPDVLHAERTQRDKDNFSPGQEVFYSCEPGYDLRGAASMRCTPQGDWSPAAPTCEVKSCDDFMGQLLNGRVLFPVNLQLGAKVDFVCDEGFQLKGSSASYCVLAGMESLWNSSVPVCEQIFCPSPPVIPNGRHTGKPLEVFPFGKTVNYTCDPHPDRGTSFDLIGESTIRCTSDPQGNGVWSSPAPRCGILGHCQAPDHFLFAKLKTQTNASDFPIGTSLKYECRPEYYGRPFSITCLDNLVWSSPKDVCKRKSCKTPPDPVNGMVHVITDIQVGSRINYSCTTG

SEQ ID NO: 1660 - protein, 558 aa, Homo sapiens
LLAVVVLLALPVAWGQCNAPEWLPFARPTNLTDEFEFPIGTYLNYECRPGYSGRPFSIICLKNSVWTGAKDRCRRKSCRNPPDPVNGMVHVIKGIQFGSQIKYSCTKGYRLIGSSSATCIISGDTVIWDNETPICDRIPCGLPPTITNGDFISTNRENFHYGSVVTYRCNPGSGGRKVFELVGEPSIYCTSNDDQVGIWSGPAPQCIIPNKCTPPNVENGILVSDNRSLFSLNEVVEFRCQPGFVMKGPRRVKCQALNKWEPELPSCSRVCQPPPDVLHAERTQRDKDNFSPGQEVFYSCEPGYDLRGAASMRCTPQGDWSPAAPTCEVKSCDDFMGQLLNGRVLFPVNLQLGAKVDFVCDEGFQLKGSSASYCVLAGMESLWNSSVPVCEQIFCPSPPVIPNGRHTGKPLEVFPFGKAVNYTCDPHPDRGTSFDLIGESTIRCTSDPQGNGVWSSPAPRCGILGHCQAPDHFLFAKLKTQTNASDFPIGTSLKYECRPEYYGRPFSITCLDNLVWSSPKDVCKRKSCKTPPDPVNGMVHVITDIQVGSRINYSCTTG

SEQ ID NO: 1661 - protein, 558 aa, Homo sapiens
LLAVVVLLALPVAWGQCNAPEWLPFARPTNLTDEFEFPIGTYLNYECRPGYSGRPFSIICLKNSVWTGAKDRCRRKSCRNPPDPVNGMVHVIKGIQFGSQIKYSCTKGYRLIGSSSATCIISGDTVIWDNETPICDRIPCGLPPTIANGDFISTNRENFHYGSVVTYRCNPGSGGRKVFELVGEPSIYCTSNDDQVGIWSGPAPQCIIPNKCTPPNVENGILVSDNRSLFSLNEVVEFRCQPGFVMKGPRRVKCQALNKWEPELPSCSRVCQPPPDVLHAERTQRDKDNFSPGQEVFYSCEPGYDLRGAASMRCTPQGDWSPAAPTCEVKSCDDFMGQLLNGRVLFPVNLQLGAKVDFVCDEGFQLKGSSASYCVLAGMESLWNSSVPVCEQIFCPSPPVIPNGRHTGKPLEVFPFGKAVNYTCDPHPDRGTSFDLIGESTIRCTSDPQGNGVWSSPAPRCGILGHCQAPDHFLFAKLKTQTNASDFPIGTSLKYECRPEYYGRPFSITCLDNLVWSSPKDVCKRKSCKTPPDPVNGMVHVITDIQVGSRINYSCTTG

SEQ ID NO: 1662 - protein, 26 aa, Homo sapiens
MNRMSYNEKSDIWSLGCLLYELCALM

SEQ ID NO: 1663 - protein, 178 aa, Homo sapiens
LRCALTMVGPAPRRRLRPLAALALVLALAPGLPTARAGQTPRPAERGPPVRLFTEEELARYGGEEEDQPIYLAVKGVVFDVTSGKEFYGRGAPYNALTGKDSTRGVAKMSLDPADLTHDTTGLTAKELEALDEVFTKVYKAKYPIVGYTARRILNEDGSPNLDFKPEDQPHFDIKDEF

SEQ ID NO: 1664 - protein, 35 aa, Homo sapiens
LESIPWGIGSAAAKDSLSARDSGAPRGPCKQVVVF

SEQ ID NO: 1665 - protein, 56 aa, Homo sapiens
LVLLLTILVCLAHTCFGCFKHLSPLNYKTEEPASDKGSEAEAHMPPPFTITWQASL

SEQ ID NO: 1666 - protein, 374 aa, Homo sapiens
LAAGRMPGGGPQGAPAAAGGGGVSHRAGSRDCLPPAACFRRRRLARRPGYMRSSTGPGIGFLSPAVGTLFRFPGGVSGEESHHSESRARQCGLDSRGLLVRSPVSKSAAAPTVTSVRGTSAHFGIQLRGGTRLPDRLSWPCGPGSAGWQQEFAAMDSSETLDASWEAACSDGARRVRAAGSLPSAELSSNSCSPGCGPEVPPTPPGSHSAFTSSFSFIRLSLGSAGERGEAEGCPPSREAESHCQSPQEMGAKAASLDGPHEDPRCLSRPFSLLATRVSADLAQAARNSSRPERDMHSLPDMDPGSSSSLDPSLAGCGGDGSSGSGDAHSWDTLLRKWEPVLRDCLLRNRRQMELEPIALDPPWKPRHPEPNSY

SEQ ID NO: 1667 - protein, 361 aa, Homo sapiens
LAAGRMPGGGPQGAPAAAGGGGVSHRAGSRDCLPPAACFRRRRLARRPGYMRSSTGPGIGFLSPAVGTLFRFPGGVSGEESHHSESRARQCGLDSRGLLVRSPVSKSAAAPTVTSVRGTSAHFGIQLRGGTRLPDRLSWPCGPGSAGWQQEFAAMDSSETLDASWEAACSDGARRVRAAGSLPSAELSSNSCSPGCGPEVPPTPPGSHSAFTSSFSFIRLSLGSAGERGEAEGCPPSREAESHCQSPQEMGAKAASLDGPHEDPRCLSRPFSLLATRVSADLAQAARNSSRPERDMHSLPDMDPGSSSSLDPSLAGCGGDGSSGSGDAHSWDTLLRKWEPVLRDCLLRNRRQMELRRYNKD

SEQ ID NO: 1668 - protein, 387 aa, Homo sapiens
LAAGRMPGGGPQGAPAAAGGGGVSHRAGSRDCLPPAACFRRRRLARRPGYMRSSTGPGIGFLSPAVGTLFRFPGGVSGEESHHSESRARQCGLDSRGLLVRSPVSKSAAAPTVTSVRGTSAHFGIQLRGGTRLPDRLSWPCGPGSAGWQQEFAAMDSSETLDASWEAACSDGARRVRAAGSLPSAELSSNSCSPGCGPEVPPTPPGSHSAFTSSFSFIRLSLGSAGERGEAEGCPPSREAESHCQSPQEMGAKAASLDGPHEDPRCLSRPFSLLATRVSADLAQAARNSSRPERDMHSLPDMDPGSSSSLDPSLAGCGGDGSSGSGDAHSWDTLLRKWEPVLRDCLLRNRRQMEVISLRLKLQKLQEDAVENDDYDKGPAEMTPTPH

SEQ ID NO: 1669 - protein, 447 aa, Homo sapiens
LAAGRMPGGGPQGAPAAAGGGGVSHRAGSRDCLPPAACFRRRRLARRPGYMRSSTGPGIGFLSPAVGTLFRFPGGVSGEESHHSESRARQCGLDSRGLLVRSPVSKSAAAPTVTSVRGTSAHFGIQLRGGTRLPDRLSWPCGPGSAGWQQEFAAMDSSETLDASWEAACSDGARRVRAAGSLPSAELSSNSCSPGCGPEVPPTPPGSHSAFTSSFSFIRLSLGSAGERGEAEGCPPSREAESHCQSPQEMGAKAASLDGPHEDPRCLSRPFSLLATRVSADLAQAARNSSRPERDMHSLPDMDPGSSSSLDPSLAGCGGDGSSGSGDAHSWDTLLRKWEPVLRDCLLRNRRQMEVISLRLKLQKLQEDAVENDDYDKAETLQQRLEDLEQEKISLHFQLPSRQPALSSFLGHLAAQVQAALRRGATQQKKSKLSKQGCLCWKPKINS

SEQ ID NO: 1670 - protein, 614 aa, Homo sapiens
LAAGRMPGGGPQGAPAAAGGGGVSHRAGSRDCLPPAACFRRRRLARRPGYMRSSTGPGIGFLSPAVGTLFRFPGGVSGEESHHSESRARQCGLDSRGLLVRSPVSKSAAAPTVTSVRGTSAHFGIQLRGGTRLPDRLSWPCGPGSAGWQQEFAAMDSSETLDASWEAACSDGARRVRAAGSLPSAELSSNSCSPGCGPEVPPTPPGSHSAFTSSFSFIRLSLGSAGERGEAEGCPPSREAESHCQSPQEMGAKAASLDGPHEDPRCLSRPFSLLATRVSADLAQAARNSSRPERDMHSLPDMDPGSSSSLDPSLAGCGGDGSSGSGDAHSWDTLLRKWEPVLRDCLLRNRRQMEVISLRLKLQKLQEDAVENDDYDKAETLQQRLEDLEQEKISLHFQLPSRQPALSSFLGHLAAQVQAALRRGATQQASGDDTHTPLRMEPRLLEPTAQDSLHVSITRRDWLLQEKQQLQKEIEALQARMFVLEAKDQQLRREIEEQEQQLQWQGCDLTPLVGQLSLGQLQEVSKALQDTLASAGQIPFHAEPPETIRREVRHQTAPCRNHQLEKPVINIWAFHLRRKICLFQADGLQHGSAEVKHLKETSVEPAGSTASRKE

SEQ ID NO: 1671 - protein, 552 aa, Homo sapiens
LAAGRMPGGGPQGAPAAAGGGGVSHRAGSRDCLPPAACFRRRRLARRPGYMRSSTGPGIGFLSPAVGTLFRFPGGVSGEESHHSESRARQCGLDSRGLLVRSPVSKSAAAPTVTSVRGTSAHFGIQLRGGTRLPDRLSWPCGPGSAGWQQEFAAMDSSETLDASWEAACSDGARRVRAAGSLPSAELSSNSCSPGCGPEVPPTPPGSHSAFTSSFSFIRLSLGSAGERGEAEGCPPSREAESHCQSPQEMGAKAASLDGPHEDPRCLSRPFSLLATRVSADLAQAARNSSRPERDMHSLPDMDPGSSSSLDPSLAGCGGDGSSGSGDAHSWDTLLRKWEPVLRDCLLRNRRQMEVISLRLKLQKLQEDAVENDDYDKAETLQQRLEDLEQEKISLHFQLPSRQPALSSFLGHLAAQVQAALRRGATQQASGDDTHTPLRMEPRLLEPTAQDSLHVSITRRDWLLQEKQQLQKEIEALQARMFVLEAKDQQLRREIEEQEQQLQWQGCDLTPLVGQLSLGQLQEVSKALQDTLASAGQIPFHAEPPETIRRCV

SEQ ID NO: 1672 - protein, 627 aa, Homo sapiens
LAAGRMPGGGPQGAPAAAGGGGVSHRAGSRDCLPPAACFRRRRLARRPGYMRSSTGPGIGFLSPAVGTLFRFPGGVSGEESHHSESRARQCGLDSRGLLVRSPVSKSAAAPTVTSVRGTSAHFGIQLRGGTRLPDRLSWPCGPGSAGWQQEFAAMDSSETLDASWEAACSDGARRVRAAGSLPSAELSSNSCSPGCGPEVPPTPPGSHSAFTSSFSFIRLSLGSAGERGEAEGCPPSREAESHCQSPQEMGAKAASLDGPHEDPRCLSRPFSLLATRVSADLAQAARNSSRPERDMHSLPDMDPGSSSSLDPSLAGCGGDGSSGSGDAHSWDTLLRKWEPVLRDCLLRNRRQMEVISLRLKLQKLQEDAVENDDYDKAETLQQRLEDLEQEKISLHFQLPSRQPALSSFLGHLAAQVQAALRRGATQQASGDDTHTPLRMEPRLLEPTAQDSLHVSITRRDWLLQEKQQLQKEIEALQARMFVLEAKDQQLRREIEEQEQQLQWQGCDLTPLVGQLSLGQLQEVSKALQDTLASAGQIPFHAEPPETIRSLQERIKSLNLSLKEITTKVCMSEKFCSTLRKKVNDIETQLPALLEAKMHAISGGHGTLWHILPDVSGGIVGAHPTFY

SEQ ID NO: 1673 - protein, 584 aa, Homo sapiens
LAAGRMPGGGPQGAPAAAGGGGVSHRAGSRDCLPPAACFRRRRLARRPGYMRSSTGPGIGFLSPAVGTLFRFPGGVSGEESHHSESRARQCGLDSRGLLVRSPVSKSAAAPTVTSVRGTSAHFGIQLRGGTRLPDRLSWPCGPGSAGWQQEFAAMDSSETLDASWEAACSDGARRVRAAGSLPSAELSSNSCSPGCGPEVPPTPPGSHSAFTSSFSFIRLSLGSAGERGEAEGCPPSREAESHCQSPQEMGAKAASLDGPHEDPRCLSRPFSLLATRVSADLAQAARNSSRPERDMHSLPDMDPGSSSSLDPSLAGCGGDGSSGSGDAHSWDTLLRKWEPVLRDCLLRNRRQMEVISLRLKLQKLQEDAVENDDYDKAETLQQRLEDLEQEKISLHFQLPSRQPALSSFLGHLAAQVQAALRRGATQQASGDDTHTPLRMEPRLLEPTAQDSLHVSITRRDWLLQEKQQLQKEIEALQARMFVLEAKDQQLRREIEEQEQQLQWQGCDLTPLVGQLSLGQLQEVSKALQDTLASAGQIPFHAEPPETIRSLQERIKSLNLSLKEITTKETISGRLKTSPRRLDH

SEQ ID NO: 1674 - protein, 667 aa, Homo sapiens
LAAGRMPGGGPQGAPAAAGGGGVSHRAGSRDCLPPAACFRRRRLARRPGYMRSSTGPGIGFLSPAVGTLFRFPGGVSGEESHHSESRARQCGLDSRGLLVRSPVSKSAAAPTVTSVRGTSAHFGIQLRGGTRLPDRLSWPCGPGSAGWQQEFAAMDSSETLDASWEAACSDGARRVRAAGSLPSAELSSNSCSPGCGPEVPPTPPGSHSAFTSSFSFIRLSLGSAGERGEAEGCPPSREAESHCQSPQEMGAKAASLDGPHEDPRCLSRPFSLLATRVSADLAQAARNSSRPERDMHSLPDMDPGSSSSLDPSLAGCGGDGSSGSGDAHSWDTLLRKWEPVLRDCLLRNRRQMEVISLRLKLQKLQEDAVENDDYDKAETLQQRLEDLEQEKISLHFQLPSRQPALSSFLGHLAAQVQAALRRGATQQASGDDTHTPLRMEPRLLEPTAQDSLHVSITRRDWLLQEKQQLQKEIEALQARMFVLEAKDQQLRREIEEQEQQLQWQGCDLTPLVGQLSLGQLQEVSKALQDTLASAGQIPFHAEPPETIRSLQERIKSLNLSLKEITTKVCMSEKFCSTLRKKVNDIETQLPALLEAKMHAISGNHFWTAKDLTEEIRSLTSEREGLEGLLSKLLVLSSRNVKKLGSVKEDYNRLRREVEHQETAYGR

SEQ ID NO: 1675 - protein, 760 aa, Homo sapiens
LAAGRMPGGGPQGAPAAAGGGGVSHRAGSRDCLPPAACFRRRRLARRPGYMRSSTGPGIGFLSPAVGTLFRFPGGVSGEESHHSESRARQCGLDSRGLLVRSPVSKSAAAPTVTSVRGTSAHFGIQLRGGTRLPDRLSWPCGPGSAGWQQEFAAMDSSETLDASWEAACSDGARRVRAAGSLPSAELSSNSCSPGCGPEVPPTPPGSHSAFTSSFSFIRLSLGSAGERGEAEGCPPSREAESHCQSPQEMGAKAASLDGPHEDPRCLSRPFSLLATRVSADLAQAARNSSRPERDMHSLPDMDPGSSSSLDPSLAGCGGDGSSGSGDAHSWDTLLRKWEPVLRDCLLRNRRQMEVISLRLKLQKLQEDAVENDDYDKAETLQQRLEDLEQEKISLHFQLPSRQPALSSFLGHLAAQVQAALRRGATQQASGDDTHTPLRMEPRLLEPTAQDSLHVSITRRDWLLQEKQQLQKEIEALQARMFVLEAKDQQLRREIEEQEQQLQWQGCDLTPLVGQLSLGQLQEVSKALQDTLASAGQIPFHAEPPETIRSLQERIKSLNLSLKEITTKVCMSEKFCSTLRKKVNDIETQLPALLEAKMHAISGNHFWTAKDLTEEIRSLTSEREGLEGLLSKLLVLSSRNVKKLGSVKEDYNRLRREVEHQETAYDGVSLCRPVWSAVVRSCSLQPLPPEFKQFSCLSLRSSWDYRCPPPCLANFVFLVEMGFYHVDQTGLKLLTSSDPPSSASQSAGITDMSHCAWPLQ

SEQ ID NO: 1676 - protein, 683 aa, Homo sapiens
LAAGRMPGGGPQGAPAAAGGGGVSHRAGSRDCLPPAACFRRRRLARRPGYMRSSTGPGIGFLSPAVGTLFRFPGGVSGEESHHSESRARQCGLDSRGLLVRSPVSKSAAAPTVTSVRGTSAHFGIQLRGGTRLPDRLSWPCGPGSAGWQQEFAAMDSSETLDASWEAACSDGARRVRAAGSLPSAELSSNSCSPGCGPEVPPTPPGSHSAFTSSFSFIRLSLGSAGERGEAEGCPPSREAESHCQSPQEMGAKAASLDGPHEDPRCLSRPFSLLATRVSADLAQAARNSSRPERDMHSLPDMDPGSSSSLDPSLAGCGGDGSSGSGDAHSWDTLLRKWEPVLRDCLLRNRRQMEVISLRLKLQKLQEDAVENDDYDKAETLQQRLEDLEQEKISLHFQLPSRQPALSSFLGHLAAQVQAALRRGATQQASGDDTHTPLRMEPRLLEPTAQDSLHVSITRRDWLLQEKQQLQKEIEALQARMFVLEAKDQQLRREIEEQEQQLQWQGCDLTPLVGQLSLGQLQEVSKALQDTLASAGQIPFHAEPPETIRSLQERIKSLNLSLKEITTKVCMSEKFCSTLRKKVNDIETQLPALLEAKMHAISGNHFWTAKDLTEEIRSLTSEREGLEGLLSKLLVLSSRNVKKLGSVKEDYNRLRREVEHQETAYGYKYCDAESWTQRSQQLA

SEQ ID NO: 1677 - protein, 564 aa, Homo sapiens
LAAGRMPGGGPQGAPAAAGGGGVSHRAGSRDCLPPAACFRRRRLARRPGYMRSSTGPGIGFLSPAVGTLFRFPGGVSGEESHHSESRARQCGLDSRGLLVRSPVSKSAAAPTVTSVRGTSAHFGIQLRGGTRLPDRLSWPCGPGSAGWQQEFAAMDSSETLDASWEAACSDGARRVRAAGSLPSAELSSNSCSPGCGPEVPPTPPGSHSAFTSSFSFIRLSLGSAGERGEAEGCPPSREAESHCQSPQEMGAKAASLDGPHEDPRCLSRPFSLLATRVSADLAQAARNSSRPERDMHSLPDMDPGSSSSLDPSLAGCGGDGSSGSGDAHSWDTLLRKWEPVLRDCLLRNRRQMEVISLRLKLQKLQEDAVENDDYDKAETLQQRLEDLEQEKISLHFQLPSRQPALSSFLGHLAAQVQAALRRGATQQASGDDTHTPLRMEPRLLEPTAQDSLHVSITRRDWLLQEKQQLQKEIEALQARMFVLEAKDQQLRREIEEQEQQLQWQGCDLTPLVGQLSLGQLQEVSKALQDTLASAGQIPFHAEPPETIRRNKCEGKYYEVHGNT

SEQ ID NO: 1678 - protein, 700 aa, Homo sapiens
LAAGRMPGGGPQGAPAAAGGGGVSHRAGSRDCLPPAACFRRRRLARRPGYMRSSTGPGIGFLSPAVGTLFRFPGGVSGEESHHSESRARQCGLDSRGLLVRSPVSKSAAAPTVTSVRGTSAHFGIQLRGGTRLPDRLSWPCGPGSAGWQQEFAAMDSSETLDASWEAACSDGARRVRAAGSLPSAELSSNSCSPGCGPEVPPTPPGSHSAFTSSFSFIRLSLGSAGERGEAEGCPPSREAESHCQSPQEMGAKAASLDGPHEDPRCLSRPFSLLATRVSADLAQAARNSSRPERDMHSLPDMDPGSSSSLDPSLAGCGGDGSSGSGDAHSWDTLLRKWEPVLRDCLLRNRRQMEVISLRLKLQKLQEDAVENDDYDKAETLQQRLEDLEQEKISLHFQLPSRQPALSSFLGHLAAQVQAALRRGATQQASGDDTHTPLRMEPRLLEPTAQDSLHVSITRRDWLLQEKQQLQKEIEALQARMFVLEAKDQQLRREIEEQEQQLQWQGCDLTPLVGQLSLGQLQEVSKALQDTLASAGQIPFHAEPPETIRSLQERIKSLNLSLKEITTKVCMSEKFCSTLRKKVNDIETQLPALLEAKMHAISGNHFWTAKDLTEEIRSLTSEREGLEGLLSKLLVLSSRNVKKLGSVKEDYNRLRREVEHQETAYAASVHCLGKCGKLTWKLVDCLSRAYSSRKPGEACL

SEQ ID NO: 1679 - protein, 837 aa, Homo sapiens
LAAGRMPGGGPQGAPAAAGGGGVSHRAGSRDCLPPAACFRRRRLARRPGYMRSSTGPGIGFLSPAVGTLFRFPGGVSGEESHHSESRARQCGLDSRGLLVRSPVSKSAAAPTVTSVRGTSAHFGIQLRGGTRLPDRLSWPCGPGSAGWQQEFAAMDSSETLDASWEAACSDGARRVRAAGSLPSAELSSNSCSPGCGPEVPPTPPGSHSAFTSSFSFIRLSLGSAGERGEAEGCPPSREAESHCQSPQEMGAKAASLDGPHEDPRCLSRPFSLLATRVSADLAQAARNSSRPERDMHSLPDMDPGSSSSLDPSLAGCGGDGSSGSGDAHSWDTLLRKWEPVLRDCLLRNRRQMEVISLRLKLQKLQEDAVENDDYDKAETLQQRLEDLEQEKISLHFQLPSRQPALSSFLGHLAAQVQAALRRGATQQASGDDTHTPLRMEPRLLEPTAQDSLHVSITRRDWLLQEKQQLQKEIEALQARMFVLEAKDQQLRREIEEQEQQLQWQGCDLTPLVGQLSLGQLQEVSKALQDTLASAGQIPFHAEPPETIRSLQERIKSLNLSLKEITTKVCMSEKFCSTLRKKVNDIETQLPALLEAKMHAISGNHFWTAKDLTEEIRSLTSEREGLEGLLSKLLVLSSRNVKKLGSVKEDYNRLRREVEHQETAYETSVKENTMKYMETLKNKLCSCKCPLLGKVWEADLEACRLLIQSLQLQEARGSLSVEDERQMDDLEGAAPPIPPRLHSEDKRKTPLKESYILSAELGEKCEDIGKKLLYLEDQLHTAIHSHDEDLIHSLRRELQMVKETLQAMILQLQPAKEAGEREAAASCMTAGVHEAQA

SEQ ID NO: 1680 - protein, 737 aa, Homo sapiens
LAAGRMPGGGPQGAPAAAGGGGVSHRAGSRDCLPPAACFRRRRLARRPGYMRSSTGPGIGFLSPAVGTLFRFPGGVSGEESHHSESRARQCGLDSRGLLVRSPVSKSAAAPTVTSVRGTSAHFGIQLRGGTRLPDRLSWPCGPGSAGWQQEFAAMDSSETLDASWEAACSDGARRVRAAGSLPSAELSSNSCSPGCGPEVPPTPPGSHSAFTSSFSFIRLSLGSAGERGEAEGCPPSREAESHCQSPQEMGAKAASLDGPHEDPRCLSRPFSLLATRVSADLAQAARNSSRPERDMHSLPDMDPGSSSSLDPSLAGCGGDGSSGSGDAHSWDTLLRKWEPVLRDCLLRNRRQMEVISLRLKLQKLQEDAVENDDYDKAETLQQRLEDLEQEKISLHFQLPSRQPALSSFLGHLAAQVQAALRRGATQHLQERIKSLNLSLKEITTKVCMSEKFCSTLRKKVNDIETQLPALLEAKMHAISGNHFWTAKDLTEEIRSLTSEREGLEGLLSKLLVLSSRNVKKLGSVKEDYNRLRREVEHQETAYETSVKENTMKYMETLKNKLCSCKCPLLGKVWEADLEACRLLIQSLQLQEARGSLSVEDERQMDDLEGAAPPIPPRLHSEDKRKTPLKVLEEWKTHLIPSLHCAGGEQKEESYILSAELGEKCEDIGKKLLYLEDQLHTAIHSHDEDLIHSLRRELQMVKETLQAMILQLQPAKEAGEREAAASCMTAGVHEAQA

SEQ ID NO: 1681 - protein, 859 aa, Homo sapiens
LAAGRMPGGGPQGAPAAAGGGGVSHRAGSRDCLPPAACFRRRRLARRPGYMRSSTGPGIGFLSPAVGTLFRFPGGVSGEESHHSESRARQCGLDSRGLLVRSPVSKSAAAPTVTSVRGTSAHFGIQLRGGTRLPDRLSWPCGPGSAGWQQEFAAMDSSETLDASWEAACSDGARRVRAAGSLPSAELSSNSCSPGCGPEVPPTPPGSHSAFTSSFSFIRLSLGSAGERGEAEGCPPSREAESHCQSPQEMGAKAASLDGPHEDPRCLSRPFSLLATRVSADLAQAARNSSRPERDMHSLPDMDPGSSSSLDPSLAGCGGDGSSGSGDAHSWDTLLRKWEPVLRDCLLRNRRQMEVISLRLKLQKLQEDAVENDDYDKAETLQQRLEDLEQEKISLHFQLPSRQPALSSFLGHLAAQVQAALRRGATQQASGDDTHTPLRMEPRLLEPTAQDSLHVSITRRDWLLQEKQQLQKEIEALQARMFVLEAKDQQLRREIEEQEQQLQWQGCDLTPLVGQLSLGQLQEVSKALQDTLASAGQIPFHAEPPETIRSLQERIKSLNLSLKEITTKVCMSEKFCSTLRKKVNDIETQLPALLEAKMHAISGNHFWTAKDLTEEIRSLTSEREGLEGLLSKLLVLSSRNVKKLGSVKEDYNRLRREVEHQETAYETSVKENTMKYMETLKNKLCSCKCPLLGKVWEADLEACRLLIQSLQLQEARGSLSVEDERQMDDLEGAAPPIPPRLHSEDKRKTPLKVLEEWKTHLIPSLHCAGGEQKEESYILSAELGEKCEDIGKKLLYLEDQLHTAIHSHDEDLIHSLRRELQMVKETLQAMILQLQPAKEAGEREAAASCMTAGVHEAQA

SEQ ID NO: 1682 - protein, 186 aa, Homo sapiens
LFSVQIFQWRQLENLYFREKKFSVEVHDPRRASVTRRTFGHSGIAVHTWYACPALIKSIWAMAISQHQFYLDRKQSKSKIHAARSLSEIAIDLTETGTLKTSKLANMGSKGKIISGSSGSLLSSGRQRPAGGTPPEHGWDPRGDPGRWGELQLGRLQGKLLQSWLCFPDQGWDPNANLRKLLPGIK

SEQ ID NO: 1683 - protein, 453 aa, Homo sapiens
LYTMVVQAAVAPNRSQRLLLKIPYGSLRRRSVERMTEGRRCQVHLLDDRKLELLVQPKLLAKELLDLVASHFNLKEKEYFGIAFTDETGHLNWLQLDRRVLEHDFPKKSGPVVLYFCVRFYIESISYLKDNATIELFFLNAKSCIYKELIDVDSEVVFELASYILQEAKGDFSSNEVVRSDLKKLPALPTQALKEHPSLAYCEDRVIEHYKKLNGQTRGQAIVNYMSIVESLPTYGVHYYAVKDKQGIPWWLGLSYKGIFQYDYHDKVKPRKIFQWRQLENLYFREKKFSVEVHDPRRASVTRRTFGHSGIAVHTWYACPALIKSIWAMAISQHQFYLDRKQSKSKIHAARSLSEIAIDLTETGTLKTSKLANMGSKGKIISGSSGSLLSSGRQRPAGGTPPEHGWDPRGDPGRWGELQLGRLQGKLLQSWLCFPDQGWDPNANLRKLLPGIK

SEQ ID NO: 1684 - protein, 62 aa, Homo sapiens
LFYFCLLQSLACFAAINEGIVAKRAICRKHLLIHRWTLTTAITGTTRDTVQVLCQIHNLACP

SEQ ID NO: 1685 - protein, 22 aa, Homo sapiens
MFLLSMLALPGAELASLLGEEK

SEQ ID NO: 1686 - protein, 188 aa, Homo sapiens
LNLNCGSFDIQKESSLWGWLILVLGAFLHRSKELPQSEDSPPEDIDHKDSYLITRSIMAEPDYIEDDNPELIRPQKLINPVKTSRNHQDLHRELLMNQKRGLAPQNKPELQKVMEKRKRDQVIKQKEEEAQKKKSDLEIELLKRQQKLEQLELEKQKLQEEQENAPEFVKVKGNLRRTGQEVAQAQES

SEQ ID NO: 1687 - protein, 262 aa, Homo sapiens
LRGGGAAALEAQSEYVVFGCGRPAPGGFLVPLWLMRNCFRLQEEMLQREEAENTLQSFRQDVDNASLARLDLERKVESLQEEIAFLKKLHEEEIQELQAQIQEQHVQIDVDVSKPDLTAALRDVRQQYESVAAKNLQEAEEWYKSKFADLSEAANRNNDALRQAKQESTEYRRQVQSLTCEVDALKGTNESLERQMREMEENFAVEAANYQDTIGRLQDEIQNMKEEMARHLREYQDLLNVKMALDIEIATYRKLLEGEESR

SEQ ID NO: 1688 - protein, 125 aa, Homo sapiens
MLQREEAENTLQSFRQDVDNASLARLDLERKVESLQEEIAFLKKLHEEEIQELQAQIQEQHVQIDVDVSKPDLTAALRDVRQQYESVAAKNLQEAEEWYKSKVGNKSVRLQPKKSIVFSKPHTCV

SEQ ID NO: 1689 - protein, 61 aa, Homo sapiens
LVFPRKNSFLLIFGLFVYLETNLDSLPLVDTHSKRTLLIKTVETRDGQVINETSQHHDDLE

SEQ ID NO: 1690 - protein, 835 aa, Homo sapiens
VRVAGLGAVTSGLPELRGTGPERPLTPAVSRRAGQAQMNLQPIFWIGLISSVCCVFAQTDENRCLKANAKSCGECIQAGPNCGWCTNSTFLQEGMPTSARCDDLEALKKKGCPPDDIENPRGSKDIKKNKNVTNRSKGTAEKLKPEDITQIQPQQLVLRLRSGEPQTFTLKFKRAEDYPIDLYYLMDLSYSMKDDLENVKSLGTDLMNEMRRITSDFRIGFGSFVEKTVMPYISTTPAKLRNPCTSEQNCTSPFSYKNVLSLTNKGEVFNELVGKQRISGNLDSPEGGFDAIMQVAVCGSLIGWRNVTRLLVFSTDAGFHFAGDGKLGGIVLPNDGQCHLENNMYTMSHYYDYPSIAHLVQKLSENNIQTIFAVTEEFQPVYKELKNLIPKSAVGTLSANSSNVIQLIIDAYNSLSSEVILENGKLSEGVTISYKSYCKNGVNGTGENGRKCSNISIGDEVQFEISITSNKCPKKDSDSFKIRPLGFTEEVEVILQYICECECQSEGIPESPKCHEGNGTFECGACRCNEGRVGRHCECSTDEVNSEDMDAYCRKENSSEICSNNGECVCGQCVCRKRDNTNEIYSGKFCECDNFNCDRSNGLICGGNGVCKCRVCECNPNYTGSACDCSLDTSTCEASNGQICNGRGICECGVCKCTDPKFQGQTCEMCQTCLGVCAEHKECVQCRAFNKGEKKDTCTQECSYFNITKVESRDKLPQPVQPDPVSHCKEKDVDDCWFYFTYSVNGNNEVMVHVVENPECPTGPDIIPIVAGVVAGIVLIGLALLLIWKLLMIIHDRREFAKFEKEKMNAKWDTGENPIYKSAVTTVVNPKYEGK

SEQ ID NO: 1691 - protein, 128 aa, Homo sapiens
MNLQPIFWIGLISSVCCVFAQTDENRCLKANAKSCGECIQAGPNCGWCTNSTFLQEGMPTSARCDDLEALKKKGCPPDDIENPRGSKDIKKNKNVTNRSKGTAEKLKPEDITQIQPQQLDLAHLWKRL

SEQ ID NO: 1692 - protein, 144 aa, Homo sapiens
VGPLPAPGCWAAAPLLSGGRARRLHLLASVISDEVRYVNPFAAAATGDMPTYQIRAPTAALPQGVVMAASPGSLHSPQQLAEEATRKRELRLMKNREAAKECRRRKKEYVKCLESRVAVLEVQNKKLIEELETLKDICSPKTDY

SEQ ID NO: 1693 - protein, 440 aa, Homo sapiens
VKYEETVFYGLQYILNKYLKGKVVTKEKIQEAKDVYKEHFQDDVVNEKGWNYILEKYDGHLPIEIKAVPEGFVIPRGNVLFTVENTDPECYWLTNWIETILVQSWYPITVATNSREQKKILAKYLLETSGNLDGLEYKLHDFGYRGVSSQETAGIGASAHLVNFKGTDTVAGLALNKKYYGTKDPVPGYSVPAAEHSTITAWGKDHEKDAFEHIVTQFSSVPVSVVSNSYDIYNACEKIWGEDLRHLIVSRSTQAPLIIRPDSGNPLDTVLKVLEILGKKFPVTENSKGYKLLPPYLRVIQGDGVDINTLQEIVEGMKQKMWSIENIAFGSGGGLLQKLTRDLLNCSFKCSYVVTNGLGINVFKDPVADPNKRSKKGRLSLHRTPAGNFVTLEEGKGDLEEYGQDLLHTVFKNGKVTKSYSFDEIRKNAQLNIELEAAHH

SEQ ID NO: 1694 - protein, 284 aa, Homo sapiens
LNSAPGKMEAAETEAEAAALEVLAEVAGILEPVGLQEEAELPAKILVEFVVDSQKKDKLLCSQLQVADFLQNILAQEDTAKGLDPLASEDTSRQKAIAAKEQWKELKATYREHVEAIKIGLTKALTQMEEAQRKRTQLREAFEQLQAKKQMAMEKRRAVQNQWQLQQEKHLQHLAEVSAEVRERKTGTQQELDRVFQKLGNLKQQAEQERDKLQRYQTFLQLLYTLQGKLLFPEAEAEAENLPDDKPQQPTRPQEQSTGDTMGRDPGVSFKAVGLQPAGDVNLP

SEQ ID NO: 1695 - protein, 237 aa, Homo sapiens
LNSAPGKMEAAETEAEAAALEVLAEVAGILEPVGLQEEAELPAKILVEFVVDSQKKDKLLCSQLQVADFLQNILAQEDTAKGLDPLASEDTSRQKAIAAKEQWKELKATYREHVEAIKIGLTKALTQMEEAQRKRTQLREAFEQLQAKKQMAMEKRRAVQNQWQLQQEKHLQHLAEVSAEGKLLFPEAEAEAENLPDDKPQQPTRPQEQSTGDTMGRDPGVSFKAVGLQPAGDVNLP

SEQ ID NO: 1696 - protein, 55 aa, Homo sapiens
LNSAPGKMEAAETEAEAAALEVLAEVAGILEPVGLQEEAELPAKILVEFVVVCTR

SEQ ID NO: 1697 - protein, 324 aa, Homo sapiens
VAAEVGGGAARPTGRWLRGLPPRPGLGAAVAAAGDRKGRRKGGGRSRHAEEQPTMPRDNMASLIQRIARQACLTFRGSGGGRGASDRDAASGPEAPMQPGFPENLSKLKSLLTQLRAEDLNIAPRKATLQPLPPNLPPVTYMHIYETDGFSLGVFLLKSGTSIPLHDHPGMHGMLKVLYGTVRISCMDKLDAGGGQRPRALPPEQQFEPPLQPREREAVRPGVLRSRAEYTEASGPCILTPHRDNLHQIDAVEGPAAFLDILAPPYDPDDGRDCHYYRVLEPVRPKEASSSACDLPREVWLLETPQADDFWCEGEPYPGPKVFP

SEQ ID NO: 1698 - protein, 205 aa, Homo sapiens
LVLALDRLLLWSFSFLICNLEVTLIHSQVALADKELLPSVRQEVKEILLRKGVQLLLSERVSNLEELPLNEYREYIKVQTDKGTEVATNLVILCTGIKINSSAYRKAFESRLASSGALRVNEHLQVEGHSNVYAIGDCADVRTPKMAYLAGLHANIAVANIVNSVKQRPLQAYKPGKRGPMCFAVLIEFGVKHGEAFLGYPIPGH

SEQ ID NO: 1699 - protein, 143 aa, Homo sapiens
LGTLIITGGRPERGPAPGRQPARPAAACPLRWPPAAARAMAGKAHRLSAEERDQLLPNLRAVGWNELEGRDAIFKQFHFKDFNRAFGFMTRVALQAEKLDHHPEWFNVYNKVHITLSTHECAGLSERDINLASFIEQVAVSMT

SEQ ID NO: 1700 - protein, 3434 aa, Homo sapiens
LGRAQSEPPARLKLRAASGERRAARGDPGAAGTPRMSLRAGGKTRRWPGPEQAARGGRSGGEQSPRRGEARRRCTHAHGAMGRHVATSCHVAWLLVLISGCWGQVNRLPFFTNHFFDTYLLISEDTPVGSSVTQLLAQDMDNDPLVFGVSGEEASRFFAVEPDTGVVWLRQPLDRETKSEFTVEFSVSDHQGVITRKVNIQVGDVNDNAPTFHNQPYSVRIPENTPVGTPIFIVNATDPDLGAGGSVLYSFQPPSQFFAIDSARGIVTVIRELDYETTQAYQLTVNATDQDKTRPLSTLANLAIIITDVQDMDPIFINLPYSTNIYEHSPPGTTVRIITAIDQDKGRPRGIGYTIVSGNTNSIFALDYISGVLTLNGLLDRENPLYSHGFILTVKGTELNDDRTPSDATVTTTFNILVIDINDNAPEFNSSEYSVAITELAQVGFALPLFIQVVDKDETQGLNSMFEVYLVGNNSHHFIISPTSVQGKADIRIRVAIPLDYETVDRYDFDLFANESVPDHVGYAKVKITLINENDNRPIFSQPLYNISLYENVTVGTSVLTVLATDNDAGTFGEVSYFFSDDPDRFSLDKDTGLIMLIARLDYELIQRFTLTIIARDGGGEETTGRVRINVLDVNDNVPTFQKDAYVGALRENEPSVTQLVRLRATDEDSPPNNQITYSIVSASAFGSYFDISLYEGYGVISVSRPLDYEQISNGLIYLTVMAMDAGNPPLNSTVPVTIEVFDENDNPPTFSKPAYFVSVVENIMAGATVLFLNATDLDRSREYGQESIIYSLEGSTQFRINARSGEITTTSLLDRETKSEYILIVRAVDGGVGHNQKTGIATVNITLLDINDNHPTWKDAPYYINLVEMTPPDSDVTTVVAVDPDLGENGTLVYSIQPPNKFYSLNSTTGKIRTTHAMLDRENPDPHEAELMRKIVVSVTDCGRPPLKATSSATVFVNLLDLNDNDPTFQNLPFVAEVLEGIPAGVSIYQVVAIDLDEGLNGLVSYRMPVGMPRMDFLINSSSGVVVTTTELDRERIAEYQLRVVASDAGTPTKSSTSTLTIHVLDVNDETPTFFPAVYNVSVSEDVPREFRVVWLNCTDNDVGLNAELSYFITGGNVDGKFSVGYRDAVVRTVVGLDRETTAAYMLILEAIDNGPVGKRHTGTATVFVTVLDVNDNRPIFLQSSYEASVPEDIPEGHSILQLKATDADEGEFGRVWYRILHGNHGNNFRIHVSNGLLMRGPRPLDRERNSSHVLIVEAYNHDLGPMRSSVRVIVYVEDINDEAPVFTQQQYSRLGLRETAGIGTSVIVVQATDRDSGDGGLVNYRILSGAEGKFEIDESTGLIITVNYLDYETKTSYMMNVSATDQAPPFNQGFCSVYITLLNELDEAVQFSNASYEAAILENLALGTEIVRVQAYSIDNLNQITYRFNAYTSTQAKALFKIDAITGVITVQGLVDREKGDFYTLTVVADDGGPKVDSTVQVYITVLDENDNSPRFDFTSDSAVSIPEDCPVGQRVATVKAWDPDAGSNGQVVFSLASGNIAGAFEIVTTNDSIGEVFVARPLDREELDHYILQVVASDRGTPPRKKDHILQVTILDINDNPPVIESPFGYNVSVNENVGGGTAVVQVRATDRDIGINSVLSYYITEGNKDMAFRMDRISGEIATRPAPPDRERQSFYHLVATVEDEGTPTLSATTHVYVTIVDENDNAPMFQQPHYEVLLDEGPDTLNTSLITIQALDLDEGPNGTVTYAIVAGNIVNTFRIDRHMGVITAAKELDYEISHGRYTLIVTATDQCPILSHRLTSTTTVLVNVNDINDNVPTFPRDYEGPFEVTEGQPGPRVWTFLAHDRDSGPNGQVEYSIMDGDPLGEFVISPVEGVLRVRKDVELDRETIAFYNLTICARDRGMPPLSSTMLVGIRVLDINDNDPVLLNLPMNITISENSPVSSFVAHVLASDADSGCNARLTFNITAGNRERAFFINATTGIVTVNRPLDRERIPEYKLTISVKDNPENPRIARRDYDLLLIFLSDENDNHPLFTKSTYQAEVMENSPAGTPLTVLNGPILALDADQDIYAVVTYQLLGAQSGLFDINSSTGVVTVRSGVIIDREAFSPPILELLLLAEDIGLLNSTAHLLITILDDNDNRPTFSPATLTVHLLENCPPGFSVLQVTATDEDSGLNGELVYRIEAGAQDRFLIHLVTGVIRVGNATIDREEQESYRLTVVATDRGTVPLSGTAIVTILIDDINDSRPEFLNPIQTVSVLESAEPGTVIANITAIDHDLNPKLEYHIVGIVAKDDTDRLVPNQEDAFAVNINTGSVMVKSPMNRELVATYEVTLSVIDNASDLPERSVSVPNAKLTVNVLDVNDNTPQFKPFGITYYMERILEGATPGTTLIAVAAVDPDKGLNGLVTYTLLDLVPPGYVQLEDSSAGKVIANRTVDYEEVHWLNFTVRASDNGSPPRAAEIPVYLEIVDINDNNPIFDQPSYQEAVFEDVPVGTIILTVTATDADSGNFALIEYSLGDGESKFAINPTTGDIYVLSSLDREKKDHYILTALAKDNPGDVASNRRENSVQVVIQVLDVNDCRPQFSKPQFSTSVYENEPAGTSVITMMATDQDEGPNGELTYSLEGPGVEAFHVDMDSGLVTTQRPLQSYEKFSLTVVATDGGEPPLWGTTMLLVEVIDVNDNRPVFVRPPNGTILHIREEIPLRSNVYEVYATDKDEGLNGAVRYSFLKTAGNRDWEFFIIDPISGLIQTAQRLDRESQAVYSLILVASDLGQPVPYETMQPLQVALEDIDDNEPLFVRPPKGSPQYQLLTVPEHSPRGTLVGNVTGAVDADEGPNAIVYYFIAAGNEEKNFHLQPDGCLLVLRDLDREREAIFSFIVKASSNRSWTPPRGPSPTLDLVADLTLQEVRVVLEDINDQPPRFTKAEYTAGVATDAKVGSELIQVLALDADIGNNSLVFYSILAIHYFRALANDSEDVGQVFTMGSMDGILRTFDLFMAYSPGYFVVDIVARDLAGHNDTAIIGIYILRDDQRVKIVINEIPDRVRGFEEEFIHLLSNITGAIVNTDNVQFHVDKKGRVNFAQTELLIHVVNRDTNRILDVDRVIQMIDENKEQLRNLFRNYNVLDVQPAISVRLPDDMSALQMAIIVLAILLFLAAMLFVLMNWYYRTVHKRKLKAIVAGSAGNRGFIDIMDMPNTNKYSFDGANPVWLDPFCRNLELAAQAEHEDDLPENLSEIADLWNSPTRTHGTFGREPAAVKPDDDRYLRAAIQEYDNIAKLGQIIREGPIKGSLLKVVLEDYLRLKKLFAQRMVQKASSCHSSISELIQTELDEEPGDHSPGQGSLRFRHKPPVELKGPDGIHVVHGSTGTLLATDLNSLPEEDQKGLGRSLETLTAAEATAFERNARTESAKSTPLHKLRDVIMETPLEITEL

SEQ ID NO: 1701 - protein, 3439 aa, Homo sapiens
LGRAQSEPPARLKLRAASGERRAARGDPGAAGTPRMSLRAGGKTRRWPGPEQAARGGRSGGEQSPRRGEARRRCTHAHGAMGRHVATSCHVAWLLVLISGCWGQVNRLPFFTNHFFDTYLLISEDTPVGSSVTQLLAQDMDNDPLVFGVSGEEASRFFAVEPDTGVVWLRQPLDRETKSEFTVEFSVSDHQGVITRKVNIQVGDVNDNAPTFHNQPYSVRIPEVGATGNTPVGTPIFIVNATDPDLGAGGSVLYSFQPPSQFFAIDSARGIVTVIRELDYETTQAYQLTVNATDQDKTRPLSTLANLAIIITDVQDMDPIFINLPYSTNIYEHSPPGTTVRIITAIDQDKGRPRGIGYTIVSGNTNSIFALDYISGVLTLNGLLDRENPLYSHGFILTVKGTELNDDRTPSDATVTTTFNILVIDINDNAPEFNSSEYSVAITELAQVGFALPLFIQVVDKDENLGLNSMFEVYLVGNNSHHFIISPTSVQGKADIRIRVAIPLDYETVDRYDFDLFANESVPDHVGYAKVKITLINENDNRPIFSQPLYNISLYENVTVGTSVLTVLATDNDAGTFGEVSYFFSDDPDRFSLDKDTGLIMLIARLDYELIQRFTLTIIARDGGGEETTGRVRINVLDVNDNVPTFQKDAYVGALRENEPSVTQLVRLRATDEDSPPNNQITYSIVSASAFGSYFDISLYEGYGVISVSRPLDYEQISNGLIYLTVMAMDAGNPPLNSTVPVTIEVFDENDNPPTFSKPAYFVSVVENIMAGATVLFLNATDLDRSREYGQESIIYSLEGSTQFRINARSGEITTTSLLDRETKSEYILIVRAVDGGVGHNQKTGIATVNITLLDINDNHPTWKDAPYYINLVEMTPPDSDVTTVVAVDPDLGENGTLVYSIQPPNKFYSLNSTTGKIRTTHAMLDRENPDPHEAELMRKIVVSVTDCGRPPLKATSSATVFVNLLDLNDNDPTFQNLPFVAEVLEGIPAGVSIYQVVAIDLDEGLNGLVSYRMPVGMPRMDFLINSSSGVVVTTTELDRERIAEYQLRVVASDAGTPTKSSTSTLTIHVLDVNDETPTFFPAVYNVSVSEDVPREFRVVWLNCTDNDVGLNAELSYFITGGNVDGKFSVGYRDAVVRTVVGLDRETTAAYMLILEAIDNGPVGKRHTGTATVFVTVLDVNDNRPIFLQSSYEASVPEDIPEGHSILQLKATDADEGEFGRVWYRILHGNHGNNFRIHVSNGLLMRGPRPLDRERNSSHVLIVEAYNHDLGPMRSSVRVIVYVEDINDEAPVFTQQQYSRLGLRETAGIGTSVIVVQATDRDSGDGGLVNYRILSGAEGKFEIDESTGLIITVNYLDYETKTSYMMNVSATDQAPPFNQGFCSVYITLLNELDEAVQFSNASYEAAILENLALGTEIVRVQAYSIDNLNQITYRFNAYTSTQAKALFKIDAITGVITVQGLVDREKGDFYTLTVVADDGGPKVDSTVKVYITVLDENDNSPRFDFTSDSAVSIPEDCPVGQRVATVKAWDPDAGSNGQVVFSLASGNIAGAFEIVTTNDSIGEVFVARPLDREELDHYILQVVASDRGTPPRKKDHILQVTILDINDNPPVIESPFGYNVSVNENVGGGTAVVQVRATDRDIGINSVLSYYITEGNKDMAFRMDRISGEIATRPAPPDRERQSFYHLVATVEDEGTPTLSATTHVYVTIVDENDNAPMFQQPHYEVLLDEGPDTLNTSLITIQALDLDEGPNGTVTYAIVAGNIVNTFRIDRHMGVITAAKELDYEISHGRYTLIVTATDQCPILSHRLTSTTTVLVNVNDINDNVPTFPRDYEGPFEVTEGQPGPRVWTFLAHDRDSGPNGQVEYSIMDGDPLGEFVISPVEGVLRVRKDVELDRETIAFYNLTICARDRGMPPLSSTMLVGIRVLDINDNDPVLLNLPMNITISENSPVSSFVAHVLASDADSGCNARLTFNITAGNRERAFFINATTGIVTVNRPLDRERIPEYKLTISVKDNPENPRIARRDYDLLLIFLSDENDNHPLFTKSTYQAEVMENSPAGTPLTVLNGPILALDADQDIYAVVTYQLLGAQSGLFDINSSTGVVTVRSGVIIDREAFSPPILELLLLAEDIGLLNSTAHLLITILDDNDNRPTFSPATLTVHLLENCPPGFSVLQVTATDEDSGLNGELVYRIEAGAQDRFLIHLVTGVIRVGNATIDREEQESYRLTVVATDRGTVPLSGTAIVTILIDDINDSRPEFLNPIQTVSVLESAEPGTVIANITAIDHDLNPKLEYHIVGIVAKDDTDRLVPNQEDAFAVNINTGSVMVKSPMNRELVATYEVTLSVIDNASDLPERSVSVPNAKLTVNVLDVNDNTPQFKPFGITYYMERILEGATPGTTLIAVAAVDPDKGLNGLVTYTLLDLVPPGYVQLEDSSAGKVIANRTVDYEEVHWLNFTVRASDNGSPPRAAEIPVYLEIVDINDNNPIFDQPSYQEAVFEDVPVGTIILTVTATDADSGNFALIEYSLGDGESKFAINPTTGDIYVLSSLDREKKDHYILTALAKDNPGDVASNRRENSVQVVIQVLDVNDCRPQFSKPQFSTSVYENEPAGTSVITMMATDQDEGPNGELTYSLEGPGVEAFHVDMDSGLVTTQRPLQSYEKFSLTVVATDGGEPPLWGTTMLLVEVIDVNDNRPVFVRPPNGTILHIREEIPLRSNVYEVYATDKDEGLNGAVRYSFLKTAGNRDWEFFIIDPISGLIQTAQRLDRESQAVYSLILVASDLGQPVPYETMQPLQVALEDIDDNEPLFVRPPKGSPQYQLLTVPEHSPRGTLVGNVTGAVDADEGPNAIVYYFIAAGNEEKNFHLQPDGCLLVLRDLDREREAIFSFIVKASSNRSWTPPRGPSPTLDLVADLTLQEVRVVLEDINDQPPRFTKAEYTAGVATDAKVGSELIQVLALDADIGNNSLVFYSILAIHYFRALANDSEDVGQVFTMGSMDGILRTFDLFMAYSPGYFVVDIVARDLAGHNDTAIIGIYILRDDQRVKIVINEIPDRVRGFEEEFIHLLSNITGAIVNTDNVQFHVDKKGRVNFAQTELLIHVVNRDTNRILDVDRVIQMIDENKEQLRNLFRNYNVLDVQPAISVRLPDDMSALQMAIIVLAILLFLAAMLFVLMNWYYRTVHKRKLKAIVAGSAGNRGFIDIMDMPNTNKYSFDGANPVWLDPFCRNLELAAQAEHEDDLPENLSEIADLWNSPTRTHGTFGREPAAVKPDDDRYLRAAIQEYDNIAKLGQIIREGPIKGSLLKVVLEDYLRLKKLFAQRMVQKASSCHSSISELIQTELDEEPGDHSPGQGSLRFRHKPPVELKGPDGIHVVHGSTGTLLATDLNSLPEEDQKGLGRSLETLTAAEATAFERNARTESAKSTPLHKLRDVIMETPLEITEL

SEQ ID NO: 1702 - protein, 40 aa, Homo sapiens
LYRLAVRPGVGLQVLSVFVLCPAKAVELLLSSARPTVGAT

SEQ ID NO: 1703 - protein, 25 aa, Homo sapiens
LGALTLGTKSNLDLEPGEIKLGMLS

SEQ ID NO: 1704 - protein, 105 aa, Homo sapiens
LPASWIPRSHPALPCSLPELTRGSGGDIVCAKGSDPCGVFLQLKSKWDESIFTKGCIQALESWLPRNIYIVAGVFIAISLLQIFGIFLARTLISDIEAVKAGHHF

SEQ ID NO: 1705 - protein, 515 aa, Homo sapiens
LLGISKLKTKSTGTPAFQNCRETAIMSEVTKNSLEKILPQLKCHFTWNLFKEDSVSRDLEDRVCNQIEFLNTEFKATMYNLLAYIKHLDGNNEAALECLRQAEELIQQEHADQAEIRSLVTWGNYAWVYYHLGRLSDAQIYVDKVKQTCKKFSNPYSIEYSELDCEEGWTQLKCGRNERAKVCFEKALEEKPNNPEFSSGLAIAMYHLDNHPEKQFSTDVLKQAIELSPDNQYVKVLLGLKLQKMNKEAEGEQFVEEALEKSPCQTDVLRSAAKFYRRKGDLDKAIELFQRVLESTPNNGYLYHQIGCCYKAKVRQMQNTGESEASGNKEMIEALKQYAMDYSNKALEKGLNPLNAYSDLAEFLETECYQTPFNKEVPDAEKQQSHQRYCNLQKYNGKSEDTAVQHGLEGLSISKKSTDKEEIKDQPQNVSENLLPQNAPNYWYLQGLIHKQNGDLLQAAKCYEKELGRLLRDAPSGIGSIFLSASELEDGSEEMGQGAVSSSPRELLSNSEQLN

SEQ ID NO: 1706 - protein, 590 aa, Homo sapiens
VTSHIWLGMWVLLRSGYPLRILLPLRGEWMGRRGLPRNLAPGPPRRRYRKETLQALDMPVLPVTATEIRQYLRGHGIPFQDGHSCLRALSPFAESSQLKGQTGVTTSFSLFIDKTTGHFLCMTSLAEGSWEDFQASVEGRGDGAREGFLLSKAPEFEDSEEVRRIWNRAIPLWELPDQEEVQLADTMFGLTKVTDDTLKRFSVRYLRPARSLVFPWFSPGGSGLRGLKLLEAKCQGDGVSYEETTIPRPSAYHNLFGLPLISRRDAEVVLTSRELDSLALNQSTGLPTLTLPRGTTCLPPALLPYLEQFRRIVFWLGDDLRSWEAAKLFARKLNPKRCFLVRPGDQQPRPLEALNGGFNLSRILRTALPAWHKSIVSFRQLREEVLGELSNVEQAAGLRWSRFPDLNRILKGHRKGELTVFTGPTGSGKTTFISEYALDLCSQGVNTLWGSFEISNVRLARVMLTQFAEGRLEDQLDKYDHWADRFEDLPLYFMTFHGQQSIRTVIDTMQHAVYVYDICHVIIDNLQFMMGHEQLSTDRIAAQDYIIGVFRKFATDNNCHVTLVIHPRKEDDDKELQTASIFGSAKVSGL

SEQ ID NO: 1707 - protein, 692 aa, Homo sapiens
VTSHIWLGMWVLLRSGYPLRILLPLRGEWMGRRGLPRNLAPGPPRRRYRKETLQALDMPVLPVTATEIRQYLRGHGIPFQDGHSCLRALSPFAESSQLKGQTGVTTSFSLFIDKTTGHFLCMTSLAEGSWEDFQASVEGRGDGAREGFLLSKAPEFEDSEEVRRIWNRAIPLWELPDQEEVQLADTMFGLTKVTDDTLKRFSVRYLRPARSLVFPWFSPGGSGLRGLKLLEAKCQGDGVSYEETTIPRPSAYHNLFGLPLISRRDAEVVLTSRELDSLALNQSTGLPTLTLPRGTTCLPPALLPYLEQFRRIVFWLGDDLRSWEAAKLFARKLNPKRCFLVRPGDQQPRPLEALNGGFNLSRILRTALPAWHKSIVSFRQLREEVLGELSNVEQAAGLRWSRFPDLNRILKGHRKGELTVFTGPTGSGKTTFISEYALDLCSQGVNTLWGSFEISNVRLARVMLTQFAEGRLEDQLDKYDHWADRFEDLPLYFMTFHGQQSIRTVIDTMQHAVYVYDICHVIIDNLQFMMGHEQLSTDRIAAQDYIIGVFRKFATDNNCHVTLVIHPRKEDDDKELQTASIFGSAKASQEADNVLILQDRKLVTGPGKRYLQVSKNRFDGDVGVFPLEFNKNSLTFSIPPKNKARLKKIKDDTGPVAKKPSSGKKGATTQNSEICSGQAPTPDQPDTSKRSK

SEQ ID NO: 1708 - protein, 403 aa, Homo sapiens
MESCYNPGLDGIIEYDDFKLNSSIVEPKEPAPETADGPYLVIVEQPKQRGFRFRYGCEGPSHGGLPGASSEKGRKTYPTVKICNYEGPAKIEVDLVTHSDPPRAHAHSLVGKQCSELGICAVSVGPKDMTAQFNNLGVLHVTKKNMMGTMIQKLQRQRLRSRPQGLTEAEQRELEQEAKELKKVMDLSIVRLRFSAFLRASDGSFSLPLKPVISQPIHDSKSPGASNLKISRMDKTAGSVRGGDEVYLLCDKVQKDDIEVRFYEDDENGWQAFGDFSPTDVHKQYAIVFRTPPYHKMKIERPVTVFLQLKRKRGGDVSDSKQFTYYPLVEDKEEVQRKRRKALPTFSQPFGGGSHMGGGSGGAAGGYGGAGGGEGVLMEGGVKVREAVEEKNLGEAGRGGSRL

SEQ ID NO: 1709 - protein, 477 aa, Homo sapiens
MGSRVTDGTHSHKTLRGRRNPRLLGRRAAGLAIERAGRERGVAPPLGRRAPSRPQPRGSPSRASPADTLAVDTLAVGTRGARGAGPLAGGGGGMKVTSLDGRQLRKMLRKEAAARCVVLDCRPYLAFAASNVRGSLNVNLNSVVLRRARGGAVSARYVLPDEAARARLLQEGGGGVAAVVVLDQGSRHWQKLREESAARVVLTSLLACLPAGPRVYFLKGGYETFYSEYPECCVDVKPISQEKIESERALISQCGKPVVNVSYRPAYDQGGPVEILPFLYLGSAYHASKCEFLANLHITALLNVSRRTSEACATHLHYKWIPVEDSHTADISSHFQEAIDFIDCVREKGGKVLVHCEAGISRSPTICMAYLMKTKQFRLKEAFDYIKQRRSMVSPNFGFMGQLLQYESEILPSTPNPQPPSCQGEAAGSSLIGHLQTLSPDMQGAYCTFPASVLAPVPTHSTVSELSRSPVATATSC

SEQ ID NO: 1710 - protein, 507 aa, Homo sapiens
LGGQNFLGVIFFGFSSSFIFLPKLLLVGEKKMPQLNGGGGDDLGANDELISFKDEGEQEEKSSENSSAERDLADVKSSLVNESETNQNSSSDSEAERRPPPRSESFRDKSRESLEEAAKRQDGGLFKGPPYPGYPFIMIPDLTSPYLPNGSLSPTARTYLQMKWPLLDVQAGSLQSRQALKDARSPSPAHIVSNKVPVVQHPHHVHPLTPLITYSNEHFTPGNPPPHLPADVDPKTGIPRPPHPPDISPYYPLSPGTVGQIPHPLGWLVPQQGQPVYPITTGGFRHPYPTALTVNASMSSFLSSRFPPHMVPPHHTLHTTGIPHPAIVTPTVKQESSQSDVGSLHSSKHQDSKKEEEKKKPHIKKPLNAFMLYMKEMRAKVVAECTLKESAAINQILGRRWHALSREEQAKYYELARKERQLHMQLYPGWSARDNYGKKKKRKRDKQPGETNEHSECFLNPCLSLPPITDLSAPKKCRARFGLDQQNNWCGPCRCKYSKEVSGTVRA

SEQ ID NO: 1711 - protein, 490 aa, Homo sapiens
LGGQNFLGVIFFGFSSSFIFLPKLLLVGEKKMPQLNGGGGDDLGANDELISFKDEGEQEEKSSENSSAERDLADVKSSLVNESETNQNSSSDSEAERRPPPRSESFRDKSRESLEEAAKRQDGGLFKGPPYPGYPFIMIPDLTSPYLPNGSLSPTARTYLQMKWPLLDVQAGSLQSRQALKDARSPSPAHIVSNKVPVVQHPHHVHPLTPLITYSNEHFTPGNPPPHLPADVDPKTGIPRPPHPPDISPYYPLSPGTVGQIPHPLGWLVPQQGQPVYPITTGGFRHPYPTALTVNASMSRFPPHMVPPHHTLHTTGIPHPAIVTPTVKQESSQSDVGSLHSSKHQDSKKEEEKKKPHIKKPLNAFMLYMKEMRAKVVAECTLKESAAINQILGRRWHALSREEQAKYYELARKERQLHMQLYPGWSARDNYGKKKKRKRDKQPGETNEHSECFLNPCLSLPPITDLSAPKKCRARFGLDQQNNWCGPCSL

SEQ ID NO: 1712 - protein, 486 aa, Homo sapiens
LGGQNFLGVIFFGFSSSFIFLPKLLLVGEKKMPQLNGGGGDDLGANDELISFKDEGEQEEKSSENSSAERDLADVKSSLVNESETNQNSSSDSEAERRPPPRSESFRDKSRESLEEAAKRQDGGLFKGPPYPGYPFIMIPDLTSPYLPNGSLSPTARTYLQMKWPLLDVQAGSLQSRQALKDARSPSPAHIVSNKVPVVQHPHHVHPLTPLITYSNEHFTPGNPPPHLPADVDPKTGIPRPPHPPDISPYYPLSPGTVGQIPHPLGWQGQPVYPITTGGFRHPYPTALTVNASMSRFPPHMVPPHHTLHTTGIPHPAIVTPTVKQESSQSDVGSLHSSKHQDSKKEEEKKKPHIKKPLNAFMLYMKEMRAKVVAECTLKESAAINQILGRRWHALSREEQAKYYELARKERQLHMQLYPGWSARDNYGKKKKRKRDKQPGETNEHSECFLNPCLSLPPITDLSAPKKCRARFGLDQQNNWCGPCSL

SEQ ID NO: 1713 - protein, 50 aa, Homo sapiens
MAGSPITVAMVKMLVLSAQLPSLSQHSGQKVGLSGYHHLYPQKDLNPVWP

SEQ ID NO: 1714 - protein, 232 aa, Homo sapiens
MRAALWTLGLGPLLLNLWAVPIGGPGALRLAYRHSTCDGVVLVRHHGAWGYVCNQEWTLAEASVVCRQLGCGPAVGAPKYVPLPGEMAQPWLHNVSCRGNESSLWECSLGSWCQSPCPHAWVVVALCSNGTFRELRLVKGRSPCAGLPEIRNVNGVDRLCVLHVEEAMVFCRELGCGPVLQAPRRDVGVVRKYLACRGTEPTIRSCRLDNNFRSGCDLRLDAEVVCSGEAAT

SEQ ID NO: 1715 - protein, 55 aa, Homo sapiens
VLCRPLGLCLLRVLTSLVSGFPFQIKGMKDRLEFWCTDVKSMEMLVEHQAHDILT

SEQ ID NO: 1716 - protein, 100 aa, Homo sapiens
LPDPATCWRVRGEARFSLVGDFLDREVISELNGKNIEDVIAQGIGKLASVPAGGAVAVSAAPGSAAPAAGSAPAAAEEKKDEKKEESEESDDDMGFGLFD

SEQ ID NO: 1717 - protein, 709 aa, Homo sapiens
LAAVAARTAPGRSPSLQLPVPPLGPAPRQALLVMAAASSPPRAERKRWGWGRLPGARRGSAGLAKKCPFSLELAEGGPAGGALYAPIAPGAPGPAPPASPAAPAAPPVASDLGPRPPVSLDPRVSIYSTRRPVLARTHVQGRVYNFLERPTGWKCFVYHFAVFLIVLVCLIFSVLSTIEQYAALATGTLFWMEIVLVVFFGTEYVVRLWSAGCRSKYVGLWGRLRFARKPISIIDLIVVVASMVVLCVGSKGQVFATSAIRGIRFLQILRMLHVDRQGGTWRLLGSVVFIHRQELITTLYIGFLGLIFSSYFVYLAEKDAVNESGRVEFGSYADALWWGVVTVTTIGYGDKVPQTWVGKTIASCFSVFAISFFALPAGILGSGFALKVQQKQRQKHFNRQIPAAASLIQTAWRCYAAENPDSSTWKIYIRKAPRSHTLLSPSPKPKKSVVVKKKKFKLDKDNGVTPGEKMLTVPHITCDPPEERRLDHFSVDGYDSSVRKSPTLLEVSMPHFMRTNSFAEDLDLEGETLLTPITHISQLREHHRATIKVIRRMQYFVAKKKFQQARKPYDVRDVIEQYSQGHLNLMVRIKELQRRLDQSIGKPSLFISVSEKSKDRGSNTIGARLNRVEDKVTQLDQRLALITDMLHQLLSLHGGSTPGSGGPPREGGAHITQPCGSGGSVDPELFLPSNTLPTYEQLTVPRRGPDEGS

SEQ ID NO: 1718 - protein, 542 aa, Homo sapiens
VPWIALKSFDHLILLTSGTSWLLIPQMCGSERILQAGNILEIRVGQAGARRVATMTSPVLVDIREEVTCPICLELLTEPLSIDCGHSFCQACITPNGRESVIGQEGERSCPVCQTSYQPGNLRPNRHLANIVRRLREVVLGPGKQLKAVLCADHGEKLQLFCQEDGKVICWLCERSQEHRGHHTFLVEEVAQEYQEKFQESLKKLKNEEQEAEKLTAFIREKKTSWKNQMEPERCRIQTEFNQLRNILDRVEQRELKKLEQEEKKGLRIIEEAENDLVHQTQSLRELISDLERRCQGSTMELLQDVSDVTERSEFWTLRKPEALPTKLRSMFRAPDLKRMLRVCRELTDVQSYWVDVTLNPHTANLNLVLAKNRRQVRFVGAKVSGPSCLEKHYDCSVLGSQHFSSGKHYWEVDVAKKTAWILGVCSNSLGPTFSFNHFAQNHSAYSRYQPQSGYWVIGLQHNHEYRAYEDSSPSLLLSMTVPPRRVGVFLDYEAGTVSFYNVTNHGFPIYTFSKYYFPTTLCPYFNPCNCVIPMTLRRPSS

SEQ ID NO: 1719 - protein, 405 aa, Homo sapiens
LELLGFSFPRCAGQRDHGEKLQLFCQEDGKVICWLCERSQEHRGHHTFLVEEVAQEYQEKFQESLKKLKNEEQEAEKLTAFIREKKTSWKNQMEPERCRIQTEFNQLRNILDRVEQRELKKLEQEEKKGLRIIEEAENDLVHQTQSLRELISDLERRCQGSTMELLQDVSDVTERSEFWTLRKPEALPTKLRSMFRAPDLKRMLRVCRELTDVQSYWVDVTLNPHTANLNLVLAKNRRQVRFVGAKVSGPSCLEKHYDCSVLGSQHFSSGKHYWEVDVAKKTAWILGVCSNSLGPTFSFNHFAQNHSAYSRYQPQSGYWVIGLQHNHEYRAYEDSSPSLLLSMTVPPRRVGVFLDYEAGTVSFYNVTNHGFPIYTFSKYYFPTTLCPYFNPCNCVIPMTLRRPSS

SEQ ID NO: 1720 - protein, 272 aa, Homo sapiens
LQADGAERSGIMRESALERGPVPEAPAGGPVHAVTVVTLLEKLASMLETLRERQGGLARRQGGLAGSVRRIQSGLGALSRSHDTTSNTLAQLLAKAERVSSHANAAQERAVRRAAQVQRLEANHGLLVARGKLHVLLFKEEGEVPASAFQKAPEPLGPADQSELGPEQLEAEVGESSDEEPVESRAQRLRRTGLQKVQSLRRALSGRKGPAAPPPTPVKPPRLGPGRSAEAQPEAQPALEPTLEPEPPQDTEEDPGRPGAAEEALLQMESVA

SEQ ID NO: 1721 - protein, 304 aa, Homo sapiens
LQADGAERSGIMRESALERGPVPEAPAGGPVHAVTVVTLLEKLASMLETLRERQGGLARRQGGLAGSVRRIQSGLGALSRSHDTTSNTLAQLLAKAERVSSHANAAQERAVRRAAQVQRLEANHGLLVARGKLHVLLFKASPTLQRFAVRTQLSLPLPSHACLSPQTLAAEEEGEVPASAFQKAPEPLGPADQSELGPEQLEAEVGESSDEEPVESRAQRLRRTGLQKVQSLRRALSGRKGPAAPPPTPVKPPRLGPGRSAEAQPEAQPALEPTLEPEPPQDTEEDPGRPGAAEEALLQMESVA

SEQ ID NO: 1722 - protein, 148 aa, Homo sapiens
VERMDCLPALEKLDWHLVFLLGWIRDVMSSQLIDYGKLGDTNERAMRMADFWLTEKDLIPKLFQVLAPRYKDQTGGYTRMLQIPNRSLDRAKMAVIEYKGNCLPPLPLPRRDSHLTLLNQLLQGLRQDLRQSQEASNHSSHTAQTPGI

SEQ ID NO: 1723 - protein, 1855 aa, Homo sapiens
LQNFLVNTINFCKKSSIYKTKCIKSHLRSLLDPHIYRVTNFPQAHFIMQWIFQSDSEQEQVNISQFSQLIEILKETQNNLMEVKVKSESPETVEEAQRKSTYEVSLALSCFLNYLQKTEQTDTQLLLLSIAAAAGYHVINNTFQSLLGCDELSFLLDEMQTAQNKYQELKNICSYRAQAFLVLTGLTATVGDTAISSEEKTQRMSLMRHHMGQSLSKEVAHVLTKPGADHDWENLEKDLRLLINGDYEEVTISSLQMEEVSKQSLFYGKKQPHEPHDNENNKWEMIKNGAFLDLLQHLGLEHYYPKKLSKANFHLIYKTSVYNTQPSSEQELPFYFLQKLLMMDYELRYLVFKDDRNTEHQVHPNASDQEDEAFDPYENFFEDSDSPTKSSSTEPSPHIHPVDIQMTIFHCADNFARQYILAKLSTCQFALPLLVPNPCTSQIEFSLWSLRQITRSWQEARKSPKGKNYYKNQQMCCVSTSIVSFVRVGNGLSASKSQIMNCLLSKRKHDVFFHRHCTGSRKDCLLMGGMVEICWFCPGGEDEDRFDNCVTFTNLHGDAKEHEQQLSFLKEVSTVIVVLMSASDDNEGNRKIVRNLWQSSRPLICLLDDKEATMTNISGQRMRMGIKNRNEAELTEELTTTIRHLLELSDTALSLEDCSQIAHQQGFLIDEDQRDCKEAKEKAQALMAFLGKMKLSQIKEKLLPLQGQLWHHWCKKDKELYHLREKGNQSIEQHKSEIETDKQIIRHEQLARALPLNDLMQSVLQFLQEHSEIHTKLYFLQWLSVFLDKLTAGHLEELHEKQKYWWSLVQTVKQKAPNSHSLICLQSEIEAISTEISDCTLGIEQLIREVGQIYEALEEASSIKKIFFSLPQIAADLMISGVPIELMDGDAAYVPLTWVAAVFDKVSEKLGDKRLFVLSILGLQSSGKSTVLNALFGLQFTVSAGKCTQGAYMQLLKVEETFTEELGFDFVLAVDTEGLRAPEHSNKSKDRDNELVTFVIGLANLTLINIFGENPSEMQDILQIVVQAFLRMKQVKIFPSCLFVHQNVGEATATDQTMDGRRRLEQKLDEMAAIAAEQEQCLDVTCFSDVIRFDVNTHVYYFAHLWDGNPPMAPPNPRYSHNVQQLKSRILMTATQESRGNIMKISDVKSRVQDLWRGLMNENFIFSFRNTQEVMAMNKLETMYNHWTWELRSHVLGLQNQLINQIQNGKIQTLEASTFEVLVTEKYEVVKQELEKYFNEGPCSKILIQCKANFENKLIVLKEKLISDSKRQANELISFKNQSQERLNKKKTDYEKELLEKSRKLALTVKGKELSEEELHEKFNQLWKKWVCDVSTTLPQVTEPDIDLDSENILWEYFKNKTNVVGLLTNSAEKFQINYDKHIKVNKKYNHIPMTLTVFEKEFINMTTDYIVSRFNKIINNMWKQQCGYNPNYFHEILKTIEEEVKSASTQKRYTFTNTFIIDLCVCLFQRARENFKEMHRAFKRANDPVNYLESKKDDFFTSFKISCQGATSIKTFVDVLWYKLTPAVSTTIWEDMTFKIAGDMRATCPAFNGNRTNLEKHILFSLAEEENFDNYWEYLHNSKSFFRSYIKNHIKRYCSDNGGEKMKTFFEKSLIDIKNTILSAIHESTSVAKDKSSTASEWLDLFCDCLGCNLIFPRRDLISIEHQEIKHTEFLKEAMSAALDLTMKKIEQNYSSKPIEAMVSKIEKMLSEHLCGCWKQCPSCGAICTNTIPTHEGDHSVPFHRPQAVNGEEWYETDDFVIDCCTSLVASDCLLVLRDGRNFPFKNYRQAGGDYAMWSITPDTSIQLYWKWFVSHFRSNLEEKYQKKFAGKGKIPNAWAKITKQDVLEDLKKQ

SEQ ID NO: 1724 - protein, 385 aa, Homo sapiens
LHPQPGGLPAGASRSSPARSATRSSRGGGCGRRAEMQRLGATLLCLLLAAAVPTAPAPAPTATSAPVKPGPALSYPQEEATLNEMFREVEELMEDTQHKLRSAVEEMEAEEAAAKASSEVNLANLPPSYHNETNTDTKVGNNTIHVHREIHKITNNQTGQMVFSETVITSVGDEEGRRSHECIIDEDCGPSMYCQFASFQYTCQPCRGQRMLCTRDSECCGDQLCVWGHCTKMATRGSNGTICDNQRDCQPGLCCAFQRGLLFPVCTPLPVEGELCHDPASRLLDLITWELEPDGALDRCPCASGLLCQPHSHSLVYVCKPTFVGSRDQDGEILLPREVPDEYEVGSFMEEVRQELEDLERSLTEEMALREPAAAAAALLGGEEI

SEQ ID NO: 1725 - protein, 170 aa, Homo sapiens
LNARLGAGIFPEDFTGQRLAWKDQGGGCGRRAEMQRLGATLLCLLLAAAVPTAPAPAPTATSAPVKPGPALSYPQEEATLNEMFREVEELMEDTQHKLRSAVEEMEAEEAAAKASSEVNLANLPPSYHNETNTDTKVGNNTIHVHREIHKEECKYDIPHFQKRNPLLLQN

SEQ ID NO: 1726 - protein, 176 aa, Homo sapiens
MQRLGATLLCLLLAAAVPTAPAPAPTATSAPVKPGPALSYPQEEATLNEMFREVEELMEDTQHKLRSAVEEMEAEEAAAKASSEVNLANLPPSYHNETNTDTKVGNNTIHVHREIHKPKLQLRIIKYGLKTRRSNVTVESGETMYQDPKLLLHLSNIFNPRLPASPVAKECPGIII

SEQ ID NO: 1727 - protein, 201 aa, Homo sapiens
LHPQPGGLPAGASRSSPARSATRSSRGGGCGRRAEMQRLGATLLCLLLAAAVPTAPAPAPTATSAPVKPGPALSYPQEEATLNEMFREVEELMEDTQHKLRSAVEEMEAEEAAAKASSEVNLANLPPSYHNETNTDTKVGNNTIHVHREIHKVSHGQHFLLSIASSPIRELRFFCFCFFICDIQAQTTIENHKIRIENQKE

SEQ ID NO: 1728 - protein, 800 aa, Homo sapiens
LTGIRQLQLILFKVALMLGVEIHVNVEFVKVLEPPEDQENQKIGWRAEFLPTDHSLSEFEFDVIIGADGRRNTLEGFRRKEFRGKLAIAITANFINRNSTAEAKVEEISGVAFIFNQKFFQDLKEETGIDLENIVYYKDCTHYFVMTAKKQSLLDKGVIINDYIDTEMLLCAENVNQDNLLSYAREAADFATNYQLPSLDFAMNHYGQPDVAMFDFTCMYASENAALVRERQAHQLLVALVGDSLLEPFWPMGTGCARGFLAAFDTAWMVKSWNQGTPPLELLAERESLYRLLPQTTPENINKNFEQYTLDPGTRYPNLNSHCVRPHQVKHLYITKELEHYPLERLGSVRRSVNLSRKESDIRPSKLLTWCQQQTEGYQHVNVTDLTTSWRSGLALCAIIHRFRPELINFDSLNEDDAVENNQLAFDVAEREFGIPPVTTGKEMASAQEPDKLSMVMYLSKFYELFRGTPLRPVDSWRKNYGENADLSLAKSSISNNYLNLTFPRKRTPRVDGQTGENDMNKRRRKGFTNLDEPSNFSSRSLGSNQECGSSKEGGNQNKVKSMANQLLAKFEESTRNPSLMKQESMRKSFPLNLGGSDTCYFCKKRVYVMERLSAEGHFFHRECFRCSICATTLRLAAYTFDCDEGKFYCKPHFIHCKTNSKQRKRRAELKQQREEEATWQEQEAPRRDTPTESSCAVAAIGTLEGSPPGISTSFFRKVLGWPLRLPRDLCNWMQGLLQAAGLHIRDNAYNYCYMYELLSLGLPLLWAFSEVLAAMYRESEGSLESICNWVLRCFPVKLR

SEQ ID NO: 1729 - protein, 169 aa, Homo sapiens
VASCGVSTLALLSLPDRRHHGSHACSRGLSQSALPYRRSVPTWLKLTSDDVKEQIYKLAKKGLTPSQIGVILRDSHGVAQVRFVTGNKILRILKSKGLAPDLPEDLYHLIKKAVAVRKHLERNRKDKDAKFRLILIESRIHRLARYYKTKRVLPPNWKYESSTASALVA

SEQ ID NO: 1730 - protein, 174 aa, Homo sapiens
LRVGWLPAAFPLSLSFRCLIAAIMGRMHAPGKGLSQSALPYRRSVPTWLKLTSDDVKEQIYKLAKKGLTPSQIGVILRDSHGVAQVRFVTGNKILRILKSKGLAPDLPEDLYHLIKKAVAVRKHLERNRKDKDAKFRLILIESRIHRLARYYKTKRVLPPNWKYESSTASALVA

SEQ ID NO: 1731 - protein, 80 aa, Homo sapiens
LRVGWLPAAFPLSLSFRCLIAAIMGRMHAPGKGLSQSALPYRRSVPTWLKLTSDDVKEQIYKLAKKGLTPSQIGECLCLT

SEQ ID NO: 1732 - protein, 55 aa, Homo sapiens
LNMRWRTILLQYCFLLITCLLTALEAVPIDIDKTKVQNIHPVESAKIEPPVSEMK

SEQ ID NO: 1733 - protein, 54 aa, Homo sapiens [sequence omitted]

SEQ ID NO: 1734 - protein, 202 aa, Homo sapiens
VIFIFSFFIVDILTYVAWKISGFPKNRVIGSGCNLDSARFRYLMGERLGVHPLSCHGWVLGEHGDSSVPVWSGMNVAGVSLKTLHPDLGTDKDKEQWKEVHKQVVESAYEVIKLKGYTSWAIGLSVADLAESIMKNLRRVHPVSTMIKGLYGIKDDVFLSVPCILGQNGISDLVKVTLTSEEEARLKKSADTLWGIQKELQF

SEQ ID NO: 1735 - protein, 182 aa, Homo sapiens
VQRDRAKRPAPTERATLPGRDHHPCPLSCPLVISSGLRARTMPSATSHSGSGSKSSGPPPPSGSSGSEAAAGAGAAAPASQHPATGTGAVQTEAMKQILGVIDKKLRNLEKKKVPGVGGEGRGGCGRALRPLRPWSLEPSLLFVSGALLGPLLPPPGPHAPSPRSAGASCPENGLLEEALVT

SEQ ID NO: 1736 - protein, 130 aa, Homo sapiens
VQRDRAKRPAPTERATLPGRDHHPCPLSCPLVISSGLRARTMPSATSHSGSGSKSSGPPPPSGSSGSEAAAGAGAAAPASQHPATGTGAVQTEAMKQILGVIDKKLRNLEKKKRLDEWIPGPCQWIQRRI

SEQ ID NO: 1737 - protein, 331 aa, Homo sapiens
LSPGLCSPTPTEARAGDAGPAARSRKQNPQSPPCCCVDDTWAQAEVGPVTSCTGFVEGSSRTGGMGSACIKVTKYFLFLFNLIFFILGAVILGFGVWILADKSSFISVLQTSSSSLRMGAYVFIGVGAVTMLMGFLGCIGAVNEVRCLLGLYFAFLLLILIAQVTAGALFYFNMGKLKQEMGGIVTELIRDYNSSREDSLQDAWDYVQAQVKCCGWVSFYNWTDNAELMNRPEVTYPCSCEVKGEEDNSLSVRKGFCEAPGNRTQSGNHPEDWPVYQEGCMEKVQAWLQENLGIILGVGVGVAIIELLGMVLSICLCRHVHSEDYSKVPKY

SEQ ID NO: 1738 - protein, 306 aa, Homo sapiens
LSPGLCSPTPTEARAGDAGPAARSRKQNPQSPPCCCVDDTWAQAEVGPVTSCTGFVEGSSRTGGMGSACIKVTKYFLFLFNLIFFILGAVILGFGVWILADKSSFISVLQTSSSSLRMGAYVFIGVGAVTMLMGFLGCIGAVNEVRCLLGLLKQEMGGIVTELIRDYNSSREDSLQDAWDYVQAQVKCCGWVSFYNWTDNAELMNRPEVTYPCSCEVKGEEDNSLSVRKGFCEAPGNRTQSGNHPEDWPVYQEGCMEKVQAWLQENLGIILGVGVGVAIIELLGMVLSICLCRHVHSEDYSKVPKY

SEQ ID NO: 1739 - protein, 122 aa, Homo sapiens
LSPGLCSPTPTEARAGDAGPAARSRKQNPQSPPCCCVDDTLSVRKGFCEAPGNRTQSGNHPEDWPVYQEGCMEKVQAWLQENLGIILGVGVGVAIIELLGMVLSICLCRHVHSEDYSKVPKY

SEQ ID NO: 1740 - protein, 31 aa, Homo sapiens
MAMLVPARQGDVRVGDGVWKAHEAQNLLQLA

SEQ ID NO: 1741 - protein, 309 aa, Homo sapiens
LPIYVDRPKKGAPSAELARKVILGGAGHARVSPRGFLPRRLLSGARAPPAGGPRESLAGEPGAWFPRQPPSRPPRRPPWGRGSPARGRGRRAIGLCAEPRGGTSAGRQTRPSAEAGLEEKMAAKQPPPLMKKHSQTDLVSRLKTRKILGVGGEDDDGEVHRSKISQVLGNEIKFTIREPLGLRVWQFVSAVLFSGIAIMALAFPDQLYDAVFDGAQVTSKTPIRLYGGALLSISLIMWNALYTAEKVIIRWTLLTEACYFGVQFLVVTATLAETGLMSLGILLLLVSRLLFVVISIYYYYQVGRRPKKA

SEQ ID NO: 1742 - protein, 95 aa, Homo sapiens
VTRQEKMATVWDEAEQDGIGEEVLKMSTEEIIQRTRLLDSEIKVGAQLLCGRWSPHRTGPGDPSRLSYFLIGHPGGDMGLGLPPHIRKRGKKTKP

SEQ ID NO: 1743 - protein, 51 aa, Homo sapiens
MCCLCVLWVLGVTFSLGDGIQNSSAGAPLLHLLPGSYWDPENHPLMVFAQA

SEQ ID NO: 1744 - protein, 49 aa, Homo sapiens
LTGTCTVWTDSPVLGKSSPCYSILARNSRHFRWQNKFNPCFSILSSSRS

SEQ ID NO: 1745 - protein, 106 aa, Homo sapiens
LQHDFGHLSVFSTSKWNHLLHHFVIGHLKGAPASWWNHMHFQHHAKPNCFRKDPDINMHPFFFALGKILSVEVRGGISGKPCCLSTSSGIFSILLSSERSGWTWPG

SEQ ID NO: 1746 - protein, 258 aa, Homo sapiens
VLGRNPALVPHPGRPPIASPPSPLHRTLGLPQGPRRRSSAAQPPPPPPPLLSRRHDDRVHLAGAPELPPGLRGRHQPPDQPGALRLLRLPVHDRHSYLSLGIPSITHSVFPFQSYYFDRDDVALKNFAKYFLHQSHEEREHAEKLMKLQNQRGGRIFLQDIKKPDCDDWESGLNAMECALHLEKNVNQSLLELHKLATDKNDPHLCDFIETHYLNEQVKAIKELGDHVTNLRKMGAPESGLAEYLFDKHTLGDSDNES

SEQ ID NO: 1747 - protein, 152 aa, Homo sapiens
MTTASTSQVRQNYHQDSEAAINRQINLELYASYVYLSMSYYFDRDDVALKNFAKYFLHQSHEEREHAEKLMKLQNQRGGRIFLQDIKKPDCDDWESGLNAMECALHLEKNVNQSLLELHKLATDKNDPHVSIGTPGNKWRKSFALGIGKAAH

SEQ ID NO: 1748 - protein, 118 aa, Homo sapiens
LRCPGVSRGPCTRAASLGWLWTTLSPSCCLGSADMNPIVVVHGGGAGPISKDRKERVHQGMVRAATVGYGILREGGSAVDAVEGAVVALEDDPEFNAGKCAFQLVNNVSQVKLLLQNK

SEQ ID NO: 1749 - protein, 104 aa, Homo sapiens
LRCPGVSRGPCTRAASLGWLWTTLSPSCCLGSADMNPIVVVHGGGAGPISKDRKERVHQGMVRAATVGYGILREGGSAVDAVEGAVVALEDDPEFNADTSLLSD

SEQ ID NO: 1750 - protein, 479 aa, Homo sapiens
LFRPRFPAAVSPRLSSFPLPSLPGGLLCGSAENPTPFLCGITMAAGTLYTYPENWRAFKALIAAQYSGAQVRVLSAPPHFHFGQTNRTPEFLRKFPAGKVPAFEGDDGFCVFESNAIAYYVSNEELRGSTPEAAAQVVQWVSFADSDIVPPASTWVFPTLGIMHHNKQATENAKEEVRRILGLLDAYLKTRTFLVGERVTLADITVVCTLLWLYKQVLEPSFRQAFPNTNRWFLTCINQPQFRAVLGEVKLCEKMAQFDAKKFAETQPKKDTPRKEKGSREEKQKPQAERKEEKKAAAPAPEEEMDECEQALAAEPKAKDPFAHLPKSTFVLDEFKRKYSNEDTLSVALPYFWEHFDKDGWSLWYSEYRFPEELTQTFMSCNLITGMFQRLDKLRKNAFASVILFGTNNSSSISGVWVFRGQELAFPLSPDWQVDYESYTWRKLDPGSEETQTLVREYFSWEGAFQHVGKAFNQGKIFK

SEQ ID NO: 1751 - protein, 487 aa, Homo sapiens
MAERWVAPAVLRRARFASTFFLSPQIYAHKDGDLRSAFFILSFKRGEFIPFLNWTLYTYPENWRAFKALIAAQYSGAQVRVLSAPPHFHFGQTNRTPEFLRKFPAGKVPAFEGDDGFCVFESNAIAYYVSNEELRGSTPEAAAQVVQWVSFADSDIVPPASTWVFPTLGIMHHNKQATENAKEEVRRILGLLDAYLKTRTFLVGERVTLADITVVCTLLWLYKQVLEPSFRQAFPNTNRWFLTCINQPQFRAVLGEVKLCEKMAQFDAKKFAETQPKKDTPRKEKGSREEKQKPQAERKEEKKAAAPAPEEEMDECEQALAAEPKAKDPFAHLPKSTFVLDEFKRKYSNEDTLSVALPYFWEHFDKDGWSLWYSEYRFPEELTQTFMSCNLITGMFQRLDKLRKNAFASVILFGTNNSSSISGVWVFRGQELAFPLSPDWQVDYESYTWRKLDPGSEETQTLVREYFSWEGAFQHVGKAFNQGKIFK

SEQ ID NO: 1752 - protein, 20 aa, Homo sapiens
VSHTGLVPSAVLIVAKKCPS

SEQ ID NO: 1753 - protein, 670 aa, Homo sapiens
LAIPGTAWNSRHSGARGKATQRPRSRRRHSYRPRLQPVLPYIRGGAKPGLLKGSDLNQSAQRVGNPPPNWNRSHSEGGSDMESGSPMGEVEISRTIRTNGRGQRGYDWQCKRPIRVAEVRSSLHSWSLRWVNELKEKGNKALSVGNIDDALQCYSEAIKLDPHNHVLYSNRSAAYAKKGDYQKAYEDGCKTVDLKPDWGKGYSRKAAALEFLNRFEEAKRTYEEGLKHEANNPQLKEGLQNMEARLAERKFMNPFNMPNLYQKLESDPRTRTLLSDPTYRELIEQLRNKPSDLGTKLQDPRIMTTLSVLLGVDLGSMDEEEEIATPPPPPPPKKETKPEPMEEDLPENKKQALKEKELGNDAYKKKDFDTALKHYDKAKELDPTNMTYITNQAAVYFEKGDYNKCRELCEKAIEVGRENREDYRQIAKAYARIGNSYFKEEKYKDAIHFYNKSLAEHRTPDVLKKCQQAEKILKEQERLAYINPDLALEEKNKGNECFQKGDYPQAMKHYTEAIKRNPKDAKLYSNRAACYTKLLEFQLALKDCEECIQLEPTFIKGYTRKAAALEAMKDYTKAMDVYQKALDLDSSCKEAADGYQRCMMAQYNRHDSPEDVKRRAMADPEVQQIMSDPAMRLILEQMQKDPQALSEHLKNPVIAQKIQKLMDVGLIAIR

SEQ ID NO: 1754 - protein, 662 aa, Homo sapiens
VPAPPRFCPRGRSPARDSADSRSASPGTGVRSEPGGRLPERSLGPAHPAPAAMAGTLDLDKGCTVEELLRGCIEAFDDSGKVRDPQLVRMFLMMHPWYIPSSQLAAKLLHIYQQSRKDNSNSLQVKTCHLVRYWISAFPAEFDLNPELAEQIKELKALLDQEGNRRHSSLIDIDSVPTYKWKRQVTQRNPVGQKKRKMSLLFDHLEPMELAEHLTYLEYRSFCKILFQDYHSFVTHGCTVDNPVLERFISLFNSVSQWVQLMILSKPTAPQRALVITHFVHVAEKLLQLQNFNTLMAVVGGLSHSSISRLKETHSHVSPETIKLWEGLTELVTATGNYGNYRRRLAACVGFRFPILGVHLKDLVALQLALPDWLDPARTRLNGAKMKQLFSILEELAMVTSLRPPVQANPDLLSLLTVSLDQYQTEDELYQLSLQREPRSKSSPTSPTSCTPPPRPPVLEEWTSAAKPKLDQALVVEHIEKMVESVFRNFDVDGDGHISQEEFQIIRGNFPYLSAFGDLDQNQDGCISREEMVSYFLRSSSVLGGRMGFVHNFQESNSLRPVACRHCKALILGIYKQGLKCRACGVNCHKQCKDRLSVECRRRAQSVSLEGSAPSPSPMHSHHHRAFSFSLPRPGRRGSRPPAEIREEEVQTVEDGVFDIHL

SEQ ID NO: 1755 - protein, 200 aa, Homo sapiens
VPAPPRFCPRGRSPARDSADSRSASPGTGVRSEPGGRLPERSLGPAHPAPAAMAGTLDLDKGCTVEELLRGCIEAFDDSGKVRDPQLVRMFLMMHPWYIPSSQLAAKLLHIYQQSRKDNSNSLQVKTCHLVRYWISAFPAEFDLNPELAEQIKELKALLDQEGNRRHSSLIDIDSVCVGGAQRAGGALSILYHLCLINVC

SEQ ID NO: 1756 - protein, 163 aa, Homo sapiens
LDRFPLPNLLYPRAFLGFSYKPSFLYSVANMQLFVRAQELHTFEVTGQETVAQIKAHVASLEGIAPEDQVVLLAGAPLEDEATLGQCGVEALTTLEVAGRMLGGKVHGSLARAGKVRGQTPKVAKQEKKKKKTGRAKRRMQYNRRFVNVVPTFGKKKGPNANS

SEQ ID NO: 1757 - protein, 82 aa, Homo sapiens
LFRVGLTLVRLALGTAEQRGACPGLLETLGALRAIPPAQLQEEAFMSQVHSVVLSERDLQREIKDQAVGKEEVLRGTYWVRH

SEQ ID NO: 1758 - protein, 283 aa, Homo sapiens
LRGDSGDSRAPLCGRRPGCSGRRGWGRRESAGPSRRAAGAVTQHWGGAGRDHPYKARRPRGLRWSFAAAVFATMPPYTVVYFPVRGRCAALRMLLADQGQSWKEEVVTVETWQEGSLKASCLYGQLPKFQDGDLTLYQSNTILRHLGRTLGLYGKDQQEAALVDMVNDGVEDLRCKYISLIYTNYEAGKDDYVKALPGQLKPFETLLSQNQGGKTFIVGDQISFADYNLLDLLLIHEVLAPGCLDAFPLLSAYVGRLSARPKLKAFLASPEYVNLPINGNGKQ

SEQ ID NO: 1759 - protein, 207 aa, Homo sapiens
VTQHWGGAGRDHPYKARRPRGLRWSFAAAVFATMPPYTVVYFPVRGRCAALRMLLADQGQSWKEEVVTVETWQEGSLKASCLYGQLPKFQDGDLTLYQSNTILRHLGRTLGLYGKDQQEAALVDMVNDGVEDLRCKYISLIYTNYISFADYNLLDLLLIHEVLAPGCLDAFPLLSAYVGRLSARPKLKAFLASPEYVNLPINGNGKQ

SEQ ID NO: 1760 - protein, 43 aa, Homo sapiens
VPLPEPCLPQQLYGQLPKFQDGDLTLYQSNTILRHLGRTLGES

SEQ ID NO: 1761 - protein, 167 aa, Homo sapiens
LAGAHRQPPGWPIPSDCVLIRRPVTRPAPLHPTPGLYGKDQQEAALVDMVNDGVEDLRCKYISLIYTNYEAGKDDYVKALPGQLKPFETLLSQNQGGKTFIVGDQISFADYNLLDLLLIHEVLAPGCLDAFPLLSAYVGRLSARPKLKAFLASPEYVNLPINGNGKQ

SEQ ID NO: 1762 - protein, 146 aa, Homo sapiens
LSTCCVAVSHPSTHILFPSSQAGAHRQPPGWPIPSDCVLIRRPVTRPAPLHPTPGLYGKDQQEAALVDMVNDGVEDLRCKYISLIYTNYEAGKDDYVKALPGQLKPFETLLSQNQGGKTFIVGDQVSIWPHAVPSSPPSASRWTQV

SEQ ID NO: 1763 - protein, 135 aa, Homo sapiens
LGMRGQGRCRVGTDAWGRRVPLPTTPVLPTGLGMTLSYLFREPATINYPFEKGPLSPRFRGEHALRRYPSGEERCIACKLCEAICPAQVSPCPNRPPRQPLPLGEGGQAALGPNPSPCLMCVPRKSLSPSEPLPS

SEQ ID NO: 1764 - protein, 206 aa, Homo sapiens
MSFLLGSWLKMATLELRTQNVLGEKGRRIRELTAVVQKRFGFPEGSVELYAEKVATRGLCAIAQAESLRYKLLGGLAVRRACYGVLRFIMESGAKGCEVVVSGKLRGQRAKSMKFVDGLMIHSGDPVNYYVDTAVRHVLLRQGVLGIKVKIMLPWDPTGKIGPKKPLPDHVSIVEPKDEILPTTPISEQKGGKPEPPAMPQPVPTA

SEQ ID NO: 1765 - protein, 100 aa, Homo sapiens
MSFLLGSWLKMATLELSGDPVNYYVDTAVRHVLLRQGVLGIKVKIMLPWDPTGKIGPKKPLPDHVSIVEPKDEILPTTPISEQKGGKPEPPAMPQPVPTA

SEQ ID NO: 1766 - protein, 195 aa, Homo sapiens
VAQLWEDEWEVLLISLQGTAPFLHVGAVAAVTMLSWIVAGQFARAERTSSQVTILCTFFTVVFALYLAPLTISSPCIMEKKDLGPKPALIGHRGAPMLAPEHTLMSFRKALEQKLYGLQADITISLDGVPFLMHDTTLRRTTNVEEEFPELARRPASMLNWTTLQRLNAGQWFLKVWLHLIPILGMENTSRDCKE

SEQ ID NO: 1767 - protein, 224 aa, Homo sapiens
MGYWSDWPVPILVTTAAAFAYIAGLLVLALCHIAVGQQMNLHWLHKGTAPFLHVGAVAAVTMLSWIVAGQFARAERTSSQVTILCTFFTVVFALYLAPLTISSPCIMEKKDLGPKPALIGHRGAPMLAPEHTLMSFRKALEQKLYGLQADITISLDGVPFLMHDTTLRRTTNVEEEFPELARRPASMLNWTTLQRLNAGQWFLKVWLHLIPILGMENTSRDCKE

SEQ ID NO: 1768 - protein, 37 aa, Homo sapiens
VVVVVFLVVRGLRPGLKWKRRHHDRTAEPRTLTVSAG

SEQ ID NO: 1769 - protein, 956 aa, Homo sapiens
LFSPENFEPHLLLLFLHALFKMIDLSFLTEEEQEAIMKVLQRDAALKRAEEERVRHLPEKIKDDQQLKNMSGQWFYEAKAKRHRDKIHGADIIRASMRKKRPQIAAEQSKDRENGAKESWVNNVNKDAFLPPELAGVVEEPEEDAAPASPSSSVVNPASSVIDMSQENTRKPNVSPEKQRKNPFNSSKLPEGHSSQQTKNEQSKNGRTGLFQTSKEDELSESKEKSTVADTSIQKLEKSKQTLPGLSNGSQIKAPIPKARKMIYKSTDLNKDDNQSFPRQRTDSLKARGAPRGILKRNSSSSSTDSETLRYNHNFEPKSKIVSPGLTIHERISEKEHSLEDNSSPNSLEPLKHVRFSAVKDELPQSPGLIHGREVGEFSVLESDRLKNGMEDAGDTEEFQSDPKPSQYRKPSLFHQSTSSPYVSKSETHQPMTSGSFPINGLHSHSEVLTARPQSMENSPTINEPKDKSSELTRLESVLPRSPADELSHCVEPEPSQVPGGSSRDRQQGSEEEPSPVLKTLERSAARKMPSKSLEDISSDSSNQAKVDNQPEELVRSAEDVSTVPTQPDNPFSHPDKLKRMSKSVPAFLQDESDDRETDTASESSYQLSRHKKSPSSLTNLSSSSGMTSLSSVSGSVMSVYSGDFGNLEVKGNIQFAIEYVESLKELHVFVAQCKDLAAADVKKQRSDPYVKAYLLPDKGKMGKKKTLVVKKTLNPVYNEILRYKIEKQILKTQKLNLSIWHRDTFKRNSFLGEVELDLETWDWDNKQNKQLRWYPLKRKTAPVALEAENRGEMKLALQYVPEPVPGKKLPTTGEVHIWVKECLDLPLLRGSHLNSFVKCTILPDTSRKSRQKTRAVGKTTNPIFNHTMVYDGFRPEDLMEACVELTVWDHYKLTNQFLGGLRIGFGTGKSYGTEVDWMDSTSEEVALWEKMVNSPNTWIEATLPLRMLLIAKISK

SEQ ID NO: 1770 - protein, 931 aa, Homo sapiens
LFSPENFEPHLLLLFLHALFKMIDLSFLTEEEQEAIMKVLQRDAALKRAEEERVRHLPEKIKDDQQLKNMSGQWFYEAKAKRHRDKIHGADIIRASMRKKRPQIAAEQSKDRENGAKESWVNNVNKDAFLPPELAGVVEEPEEDAAPASPSSSVVNPASSVIDMSQENTRKPNVSPEKRKNPFNSSKLPEGHSSQQTKNEQSKNGRTGLFQTSKEDELSESKEKSTVADTSIQKLEKSKQTLPGLSNGSQIKAPIPKARKMIYKSTDLNKDDNQSFPRQRTDSLKARGAPRGILKRNSSSSSTDSETLRYNHNFEPKSKIVSPGLTIHERISEKEHSLEDNSSPNSLEPLKHVRFSAVKDELPQSPGLIHGREVGEFSVLESDRLKNGMEDAGDTEEFQSDPKPSQYRKPSLFHQSTSSPYVSKSETHQPMTSGSFPINGLHSHSEVLTARPQSMENSPTINEPKDKSSELTRLESVLPRSPADELSHCVEPEPSQVPGGSSRDRQQGSEEEPSPVLKTLERSAARKMPSKSLEDISSDSSNQAKVDNQPEELVRSAEDDEKPDQKPVTNECVPRISTVPTQPDNPFSHPDKLKRMSKSVPAFLQDEVSGSVMSVYSGDFGNLEVKGNIQFAIEYVESLKELHVFVAQCKDLAAADVKKQRSDPYVKAYLLPDKGKMGKKKTLVVKKTLNPVYNEILRYKIEKQILKTQKLNLSIWHRDTFKRNSFLGEVELDLETWDWDNKQNKQLRWYPLKRKTAPVALEAENRGEMKLALQYVPEPVPGKKLPTTGEVHIWVKECLDLPLLRGSHLNSFVKCTILPDTSRKSRQKTRAVGKTTNPIFNHTMVYDGFRPEDLMEACVELTVWDHYKLTNQFLGGLRIGFGTGKSYGTEVDWMDSTSEEVALWEKMVNSPNTWIEATLPLRMLLIAKISK

SEQ ID NO: 1771 - protein, 955 aa, Homo sapiens
LFSPENFEPHLLLLFLHALFKMIDLSFLTEEEQEAIMKVLQRDAALKRAEEERVRHLPEKIKDDQQLKNMSGQWFYEAKAKRHRDKIHGADIIRASMRKKRPQIAAEQSKDRENGAKESWVNNVNKDAFLPPELAGVVEEPEEDAAPASPSSSVVNPASSVIDMSQENTRKPNVSPEKRKNPFNSSKLPEGHSSQQTKNEQSKNGRTGLFQTSKEDELSESKEKSTVADTSIQKLEKSKQTLPGLSNGSQIKAPIPKARKMIYKSTDLNKDDNQSFPRQRTDSLKARGAPRGILKRNSSSSSTDSETLRYNHNFEPKSKIVSPGLTIHERISEKEHSLEDNSSPNSLEPLKHVRFSAVKDELPQSPGLIHGREVGEFSVLESDRLKNGMEDAGDTEEFQSDPKPSQYRKPSLFHQSTSSPYVSKSETHQPMTSGSFPINGLHSHSEVLTARPQSMENSPTINEPKDKSSELTRLESVLPRSPADELSHCVEPEPSQVPGGSSRDRQQGSEEEPSPVLKTLERSAARKMPSKSLEDISSDSSNQAKVDNQPEELVRSAEDVSTVPTQPDNPFSHPDKLKRMSKSVPAFLQDESDDRETDTASESSYQLSRHKKSPSSLTNLSSSSGMTSLSSVSGSVMSVYSGDFGNLEVKGNIQFAIEYVESLKELHVFVAQCKDLAAADVKKQRSDPYVKAYLLPDKGKMGKKKTLVVKKTLNPVYNEILRYKIEKQILKTQKLNLSIWHRDTFKRNSFLGEVELDLETWDWDNKQNKQLRWYPLKRKTAPVALEAENRGEMKLALQYVPEPVPGKKLPTTGEVHIWVKECLDLPLLRGSHLNSFVKCTILPDTSRKSRQKTRAVGKTTNPIFNHTMVYDGFRPEDLMEACVELTVWDHYKLTNQFLGGLRIGFGTGKSYGTEVDWMDSTSEEVALWEKMVNSPNTWIEATLPLRMLLIAKISK

SEQ ID NO: 1772 - protein, 477 aa, Homo sapiens
LHALFKMIDLSFLTEEEQEAIMKVLQRDAALKRAEEERVRHLPEKIKDDQQLKNMSGQWFYEAKAKRHRDKIHGADIIRASMRKKRPQIAAEQSKDRENGAKESWVNNVNKDAFLPPELAGVVEEPEEDAAPASPSSSVVNPASSVIDMSQENTRKPNVSPEKRKNPFNSSKLPEGHSSQQTKNEQSKNGRTGLFQTSKEDELSESKEKSTVADTSIQKLEKSKQTLPGLSNGSQIKAPIPKARKMIYKSTDLNKDDNQSFPRQRTDSLKARGAPRGILKRNSSSSSTDSETLRYNHNFEPKSKIVSPGLTIHERISEKEHSLEDNSSPNSLEPLKHVRFSAVKDELPQSPGLIHGREVGEFSVLESDRLKNGMEDAGDTEEFQSDPKPSQYRKPSLFHQSTSSPYVSKSETHQPMTSGSFPINGLHSHSEVLTARPQSMENSPTINEPKDKSSELTRLESVLPRSPAGKRVVTTRL

SEQ ID NO: 1773 - protein, 58 aa, Homo sapiens
LTTLCVVFNLLSCFFPRCTTLTHHKCGAAIRQTSFSRDSSILIAVCDDASIWRWDRLR

SEQ ID NO: 1774 - protein, 32 aa, Homo sapiens
MFLLPPGNKALKSAVEKPNVCEIQETMLANHW

SEQ ID NO: 1775 - protein, 65 aa, Homo sapiens
LSKQDLLFLDMLKFLCLCVTTAQTNTVSFRAADIRRKLLMLIDSSTLEPTKSLHLHMQCVFFVSS

SEQ ID NO: 1776 - protein, 392 aa, Homo sapiens
MSKGPAVGIDLGTTYSCVGVFQHGKVEIIANDQGNRTTPSYVAFTDTERLIGDAAKNQVAMNPTNTVFDAKRLIGRRFDDAVVQSDMKHWPFMVVNDAGRPKVQVEYKGETKSFYPEEVSSMVLTKMKEIAEAYLGKTVTNAVVTVPAYFNDSQRQATKDAGTIAGLNVLRIINEPTAAAIAYGLDKKVGAERNVLIFDLGGGTFDVSILTIEDGIFEVKSTAGDTHLGGEDFDNRMVNHFIAEFKRKHKKDISENKRAVRRLRTACERAKRTLSSSTQASIEIDSLYEGIDFYTSITRARFEELNADLFRGTLDPVEKALRDAKLDKSQIHDIVLVGGSTRIPKIQKLLQDFFNGKELNKSINPDEAVAYGAGNNGISINPKGRQAQGDSL

SEQ ID NO: 1777 - protein, 236 aa, Homo sapiens
LRPTLPFPGAVRRAGASLKVPERCATMSKGPAVGIDLGTTYSCVGVFQHGKVEIIANDQGNRTTPSYVAFTDTERLIGDAAKNQVAMNPTNTVFDAKRLIGRRFDDAVVQSDMKHWPFMVVNDAGRPKVQVEYKGETKSFYPEEVSSMVLTKMKEIAEAYLGKTVTNAVVTVPAYFNDSQRQATKDAGTIAGLNVLRIINEPTAAAIAYGLDKKVCTICDASSDYFKINLIHRKFK

SEQ ID NO: 1778 - protein, 212 aa, Homo sapiens
LYLFSFLGAKRPRVTSGGVSESPSGFSKHIQSNLDFSPVNSASSEENVKYSSSQPEPRTGLSLWDTSPSYIDKLVQGISFSQPTCPDHMLLNSQLLGTPGSSQNPWQRLVKRMTRFFTKLDADKSYQCLKETCEKLGYQWKKSCMNQVTISTTDRRNNKLIFKVNLLEMDDKILVDFRLSKGDGLEFKRHFLKIKGKLIDIVSSQKIWLPAT

SEQ ID NO: 1779 - protein, 167 aa, Homo sapiens
LAGVPTPKSHLQLLGAVCMFLASKLKETSPLTAEKLCIYTDNSIKPQELLEWELVVLGKLKWNLAAVTPHDFIEHILRKLPQQREKLSLIRKHAQTFIALCATAQQVGQGKGKGCNQEMPQERLRGVSKSQRPAPDSISASFRVARRLLLLRHVCHVQHSSQTHSLD

SEQ ID NO: 1780 - protein, 394 aa, Homo sapiens
LGWDWLSLAGGGVRVTACRRAPGFYKLSPQPPASLSAPPVRQSAASSFASPAEPHRSDTMGKVKVGVNGFGRIGRLVTRAAFNSGKVDIVAINDPFIDLNYMVYMFQYDSTHGKFHGTVKAENGKLVINGNPITIFQERDPSKIKWGDAGAEYVVESTGVFTTMEKAGAHLQGGAKRVIISAPSADAPMFVMGVNHEKYDNSLKIISNASCTTNCLAPLAKVIHDNFGIVEGLMTTVHAITATQKTVDGPSGKLWRDGRGALQNIIPASTGAAKAVGKVIPELNGKLTGMAFRVPTANVSVVDLTCRLEKPAKYDDIKKVVKQASEGPLKGILGYTEHQVVSSDFNSDTHSSTFDAGAGIALNDHFVKLISWYDNEFGYSNRVVDLMAHMASKE

SEQ ID NO: 1781 - protein, 345 aa, Homo sapiens
LRAEPHRSDTMGKVKVGVNGFGRIGRLVTRAAFNSGKVDIVAINDPFIDLNYMVYMFQYDSTHGKFHGTVKAENGKLVINGNPITIFQERDPSKIKWGDAGAEYVVESTGVFTTMEKAGAHLQGGAKRVIISAPSADAPMFVMGVNHEKYDNSLKIISNASCTTNCLAPLAKVIHDNFGIVEGLMTTVHAITATQKTVDGPSGKLWRDGRGALQNIIPASTGAAKAVGKVIPELNGKLTGMAFRVPTANVSVVDLTCRLEKPAKYDDIKKVVKQASEGPLKGILGYTEHQVVSSDFNSDTHSSTFDAGAGIALNDHFVKLISWYDNEFGYSNRVVDLMAHMASKE

SEQ ID NO: 1782 - protein, 264 aa, Homo sapiens
VEDRMEEMRDPSKIKWGDAGAEYVVESTGVFTTMEKAGAHLQGGAKRVIISAPSADAPMFVMGVNHEKYDNSLKIISNASCTTNCLAPLAKVIHDNFGIVEGLMTTVHAITATQKTVDGPSGKLWRDGRGALQNIIPASTGAAKAVGKVIPELNGKLTGMAFRVPTANVSVVDLTCRLEKPAKYDDIKKVVKQASEGPLKGILGYTEHQVVSSDFNSDTHSSTFDAGAGIALNDHFVKLISWYDNEFGYSNRVVDLMAHMASKE

SEQ ID NO: 1783 - protein, 298 aa, Homo sapiens
VEDRMEEMCFGEATRMVWLPWVYGNLVSLNMVLSPSPPHPHRRDPSKIKWGDAGAEYVVESTGVFTTMEKAGAHLQGGAKRVIISAPSADAPMFVMGVNHEKYDNSLKIISNASCTTNCLAPLAKVIHDNFGIVEGLMTTVHAITATQKTVDGPSGKLWRDGRGALQNIIPASTGAAKAVGKVIPELNGKLTGMAFRVPTANVSVVDLTCRLEKPAKYDDIKKVVKQASEGPLKGILGYTEHQVVSSDFNSDTHSSTFDAGAGIALNDHFVKLISWYDNEFGYSNRVVDLMAHMASKE

SEQ ID NO: 1784 - protein, 235 aa, Homo sapiens
MTTLVSWKDSWYESWGMGLRLPPFSSKTGSSLPGLRATLGLGVLGTGFPIISFQGGEGGRGVMWGVRCRASLLLQTTVHAITATQKTVDGPSGKLWRDGRGALQNIIPASTGAAKAVGKVIPELNGKLTGMAFRVPTANVSVVDLTCRLEKPAKYDDIKKVVKQASEGPLKGILGYTEHQVVSSDFNSDTHSSTFDAGAGIALNDHFVKLISWYDNEFGYSNRVVDLMAHMASKE

SEQ ID NO: 1785 - protein, 175 aa, Homo sapiens
LRVSAPDPPPPHPARLCRLFQRPSLPSGRRCRCRRRRRHRARFRPRPPSAVQGPSVSAPGPRLPASPGPGPGTMSEKSVEAAAELSAKDLKEKKEKVEEKASRKERKKEVVEEEENGAEEEEEETAEDGEEEDEGEEEDEEEEEEDDEGPALKRAAEEEDEADPKRQKTENGASA

SEQ ID NO: 1786 - protein, 83 aa, Homo sapiens
LLCLLSATALLCSLGHPRPHLLRLPDLPSFPAFLWIPASGHPSPPSLQGPLLVSLLLEPLPPPPSLQNFSFTPHPPPLPPFLF

SEQ ID NO: 1787 - protein, 554 aa, Homo sapiens
LRSLALWILLIPFLGSPSTPKASLGREETETQVLPAPCFSLGKHPGSFSTPASRLTPPPLGLSFAHLVKPLQPGAEVPVVWAQEGAPAQLPCSPTIPLQDLSLLRRAGVTWQHQPDSGPPAAAPGHPLAPGPHPAAPSSWGPRPRRYTVLSVGPGGLRSGRLPLQPRVQLDERGRQRGDFSLWLRPARRADAGEYRAAVHLRDRALSCRLRLRLGQASMTASPPGSLRASDWVILNCSFSRPDRPASVHWFRNRGQGRVPVRESPHHHLAESFLFLPQVSPMDSGPWGCILTYRDGFNVSIMYNLTVLGLEPPTPLTVYAGAGSRVGLPCRLPAGVGTRSFLTAKWTPPGGGPDLLVTGDNGDFTLRLEDVSQAQAGTYTCHIHLQEQQLNATVTLAIITVTPKSFGSPGSLGKLLCEVTPVSGQERFVWSSLDTPSQRSFSGPWLEAQEAQLLSQPWQCQLYQGERLLGAAVYFTELSSPGAQRSGRAPGALPAGHLLLFLILGVLSLLLLVTGAFGFHLWRRQVSQGHGNPAPQQLPLFHPQSADGTPSSGR

SEQ ID NO: 1788 - protein, 536 aa, Homo sapiens
VWRSLAIGLPVSLHLSTTLQKEQSTLPTGLLVAELQVLTQIRLFEKQRARKTQAQRPCHFCGLRSLLAQAPASLGKATMNRGVPFRHLLLVLQLALLPAATQGKKVVLGKKGDTVELTCTASQKKSIQFHWKNSNQIKILGNQGSFLTKGPSKLNDRADSRRSLWDQGNFPLIIKNLKIEDSDTYICEVEDQKEEVQLLVFGLTANSDTHLLQGQSLTLTLESPPGSSPSVQCRSPRGKNIQGGKTLSVSQLELQDSGTWTCTVLQNQKKVEFKIDIVVLAFQKASSIVYKKEGEQVEFSFPLAFTVEKLTGSGELWWQAERASSSKSWITFDLKNKEVSVKRVTQDPKLQMGKKLPLHLTLPQALPQYAGSGNLTLALEAKTGKLHQEVNLVVMRATQLQKNLTCEVWGPTSPKLMLSLKLENKEAKVSKREKAVWVLNPEAGMWQCLLSDSGQVLLESNIKVLPTWSTPVQPMALIVLGGVAGLLLFIGLGIFFCVRCRHRRRQAERMSQIKRLLSEKKTCQCPHRFQKTCSPI

SEQ ID NO: 1789 - protein, 208 aa, Homo sapiens
LQKEQSTLPTGLLVAELQVLTQIRLFEKQRARKTQAQRPCHFCGLRSLLAQAPASLGKATMNRGVPFRHLLLVLQLGPSKLNDRADSRRSLWDQGNFPLIIKNLKIEDSDTYICEVEDQKEEVQLLVFGLTANSDTHLLQGQSLTLTLESPPGSSPSVQCRSPRGKNIQGGKTLSVSQLELQDSGTWTCTVLQNQKKVEFKIDIVVLG

SEQ ID NO: 1790 - protein, 129 aa, Homo sapiens
LGSALLGWGAGRAQAGWGWTQRTSNLEGLAGERVQPPSRFPVSWSLVWARRAEAQPGGGFLNTDPMFLAGARVTPRPVSHGGDGATASGSGAAQEADCSNSRALPLGPQKTAGDMRSVAQGEGAGFALE

SEQ ID NO: 1791 - protein, 341 aa, Homo sapiens
LSRKPRNRGGGDRAPDSPRTLPQEGGTSEQCIIGRRPGRRQEGGRGAGLRGTGRAMAEDGEEAEFHFAALYISGQWPRLRADTDLQRLGSSAMAPSRKFFVGGNWKMNGRKQSLGELIGTLNAAKVPADTEVVCAPPTAYIDFARQKLDPKIAVAAQNCYKVTNGAFTGEISPGMIKDCGATWVVLGHSERRHVFGESDELIGQKVAHALAEGLGVIACIGEKLDEREAGITEKVVFEQTKVIADNVKDWSKVVLAYEPVWAIGTGKTATPQQAQEVHEKLRGWLKSNVSDAVAQSTRIIYGGSVTGATCKELASQPDVDGFLVGGASLKPEFVDIINAKQ

SEQ ID NO: 1792 - protein, 1032 aa, Homo sapiens
LGETGSRCKSTASATQIGICPGPLYGLVWAAGSFPSLPCCTPLLGDPLYPSRKVESAGWRLPGEANAWPCPAPRRTMTLLLLPLLLASLLASCSCNKANKHKPWIEAEYQGIVMENDNTVLLNPPLFALDKDAPLRYAGEICGFRLHGSGVPFEAVILDKATGEGLIRAKEPVDCEAQKEHTFTIQAYDCGEGPDGANTKKSHKATVHVRVNDVNEFAPVFVERLYRAAVTEGKLYDRILRVEAIDGDCSPQYSQICYYEILTPNTPFLIDNDGNIENTEKLQYSGERLYKFTVTAYDCGKKRAADDAEVEIQVKPTCKPSWQGWNKRIEYAPGAGSLALFPGIRLETCDEPLWNIQATIELQTSHVAKGCDRDNYSERALRKLCGAATGEVDLLPMPGPNANWTAGLSVHYSQDSSLIYWFNGTQAVQVPLGGPSGLGSGPQDSLSDHFTLSFWMKHGVTPNKGKKEEETIVCNTVQNEDGFSHYSLTVHGCRIAFLYWPLLESARPVKFLWKLEQVCDDEWHHYALNLEFPTVTLYTDGISFDPALIHDNGLIHPPRREPALMIGACWTEEKNKEKEKGDNSTDTTQGDPLSIHHYFHGYLAGFSVRSGRLESREVIECLYACREGLDYRDFESLGKGMKVHVNPSQSLLTLEGDDVETFNHALQHVAYMNTLRFATPGVRPLRLTTAVKCFSEESCVSIPEVEGYVVVLQPDAPQILLSGTAHFARPAVDFEGTNGVPLFPDLQITCSISHQVEAKKDESWQGTVTDTRMSDEIVHNLDGCEISLVGDDLDPERESLLLDTTSLQQRGLELTNTSAYLTIAGVESITVYEEILRQARYRLRHGAALYTRKFRLSCSEMNGRYSSNEFIVEVNVLHSMNRVAHPSHVLSSQQFLHRGHQPPPEMAGHSLASSHRNSMIPSAATLIIVVCVGFLVLMVVLGLVRIHSLHRRVSGAGGPPGASSDPKDPDLFWDDSALTIIVNPMESYQNRQSCVTGAVGGQQEDEDSSDSEVADSPSSDERRIIETPPHRY

SEQ ID NO: 1793 - protein, 468 aa, Homo sapiens
VCEDARPACGSRSRRRRKEAAPGIPTPSPSSPSPTSSRPAARASSKAPARLSRPRAREEPPDPGRRYIQEEIIQARKHKLIKMCSSVAAKLWFLTDRRIREDYPQKEILRALKAKCCEEELDFRAVVMDEVVLTIEQGNLGLRINGELITAYPQVVVVRVPTPWVQSDSDITVLRHLEKMGCRLMNRPQAILNCVNKFWTFQELAGHGVPLPDTFSYGGHENFAKMIDEAEVLEFPMVVKNTRGHRGKAVFLARDKHHLADLSHLIRHEAPYLFQKYVKESHGRDVRVIVVGGRVVGTMLRCSTDGRMQSNCSLGGVGMMCSLSEQGKQLAIQVSNILGMDVCGIDLLMKDDGSFCVCEANANVGFIAFDKACNLDVAGIIADYAASLLPSGRLTRRMSLLSVVSTASETSEPELGPPASTAVDNMSASSSSVDSDPESTERELLTKLPGGLFNMNQLLANEIKLLVD

SEQ ID NO: 1794 - protein, 28 aa, Homo sapiens
LGLLTAVLLSVLLYQWILCQEPAPSFPQ

SEQ ID NO: 1795 - protein, 19 aa, Homo sapiens
MVILIALFNQEVQIPLTGK

SEQ ID NO: 1796 - protein, 344 aa, Homo sapiens
LRREIRPGLPESEPRPPRPPAALTADQPPPRRLSESRGGGGMSEAGEATTTTTTTLPQAPTEAAAAAPQDPAPKSPVGSGAPQAAAPAPAAHVAGNPGGDAAPAATGTAAAASLATAAGSEDAEKKVLATKVLGTVKWFNVRNGYGFINRNDTKEDVFVHQTAIKKNNPRKYLRSVGDGETVEFDVVEGEKGAEAANVTGPDGVPVEGSRYAADRRRYRRGYYGRRRGPPRNAGEIGEMKDGVPEGAQLQGPVHRNPTYRPRYRSRGPPRPRPAPAVGEAEDKENQQATSGPNQPSVRRGYRRPYNYRRRPRPPNAPSQDGKEAKAGEAPTENPAPPTQQSSAE

SEQ ID NO: 1797 - protein, 493 aa, Homo sapiens
LIRTMESRVLLRTFCLIFGLGAVWGLGVDPSLQIDVLTELELGESTTGVRQVPGLHNGTKAFLFQDTPRSIKASTATAEQFFQKLRNKHEFTILVTLKQTHLNSGVILSIHHLDHRYLELESSGHRNEVRLHYRSGSHRPHTEVFPYILADDKWHKLSLAISASHLILHIDCNKIYERVVEKPSTDLPLGTTFWLGQRNNAHGYFKGIMQDVQLLVMPQGFIAQCPDLNRTCPTCNDFHGLVQKIMELQDILAKTSAKLSRAEQRMNRLDQCYCERTCTMKGTTYREFESWIDGCKNCTCLNGTIQCETLICPNPDCPLKSALAYVDGKCCKECKSICQFQGRTYFEGERNTVYSSSGVCVLYECKDQTMKLVESSGCPALDCPESHQITLSHSCCKVCKGYDFCSERHNCMENSICRNLNDRAVCSCRDGFRALREDNAYCEDIDECAEGRHYCRENTMCVNTPGSFMCICKTGYIRIDDYSCTGKRWLFVK

SEQ ID NO: 1798 - protein, 116 aa, Homo sapiens
LIRTMESRVLLRTFCLIFGLGAVWGLGVDPSLQIDVLTELELGESTTGVRQVPGLHNGTKAFLFQDTPRSIKASTATAEQFFQKLRNKHEFTILVTLKQTHLNSGVILSIHHLDHR

SEQ ID NO: 1799 - protein, 91 aa, Homo sapiens
LIRTMESRVLLRTFCLIFGLGAVWGLGVDPSLQIDVLTELELGESTTGVRQVPGLHNGTKAFLFQGMPGVLHPHCDFSSDNPGRSCSCRLS

SEQ ID NO: 1800 - protein, 46 aa, Homo sapiens
VVGGAAGEELPGVRALQDMTPVAYHGHGVSAFRCCSPLLLQAKARR

SEQ ID NO: 1801 - protein, 507 aa, Homo sapiens
LSLCWSLQLVVKRLGYDTRVTVLGHVQRGGTPSAFDRILGSRMGVEAVMALLEGTPDTPACVVSLSGNQAVRLPLMECVQVTKDVTKAMDEKKFDEALKLRGRSFMNNWEVYKLLAHVRPPVSKSGSHTVAVMNVGAPAAGMNAAVRSTVRIGLIQGNRVLVVHDGFEGLAKGQIEEAGWSYVGGWTGQGGSKLGTKRTLPKKSFEQISANITKFNIQGLVIIGGFEAYTGGLELMEGRKQFDELCIPFVVIPATVSNNVPGSDFSVGADTALNTICTTCDRIKQSAAGTKRRVFIIETMGGYCGYLATMAGLAAGADAAYIFEEPFTIRDLQANVEHLVQKMKTTVKRGLVLRNEKCNENYTTDFIFNLYSEEGKGIFDSRKNVLGHMQQGGSPTPFDRNFATKMGAKAMNWMSGKIKESYRNGRIFANTPDSGCVLGMRKRALVFQPVAELKDQTDFEHRIPKEQWWLKLRPILKILAKYEIDLDTSDHAHLEHITRKRSGEAAV

SEQ ID NO: 1802 - protein, 133 aa, Homo sapiens
MRECISIHVGQAGVQIGNACWELYCLEHGIQPDGQMPSDKTIGGGDDSFNTFFSETGAGKHVPRAVFVDLEPTVIDEVRTGTYRQLFHPEQLITGKEDAANNYARGHYTIGKEIIDLVLDRIRKLVCFFSRIK

SEQ ID NO: 1803 - protein, 148 aa, Homo sapiens
LLPSLRLLHRRRPLQVLVMRECISIHVGQAGVQIGNACWELYCLEHGIQPDGQMPSDKTIGGGDDSFNTFFSETGAGKHVPRAVFVDLEPTVIDEVRTGTYRQLFHPEQLITGKEDAANNYARGHYTIGKEIIDLVLDRIRKLVSIVL

SEQ ID NO: 1804 - protein, 467 aa, Homo sapiens
LLPSLRLLHRRRPLQVLVMRECISIHVGQAGVQIGNACWELYCLEHGIQPDGQMPSDKTIGGGDDSFNTFFSETGAGKHVPRAVFVDLEPTVIDEVRTGTYRQLFHPEQLITGKEDAANNYARGHYTIGKEIIDLVLDRIRKLADQCTGLQGFLVFHSFGGGTGSGFTSLLMERLSVDYGKKSKLEFSIYPAPQVSTAVVEPYNSILTTHTTLEHSDCAFMVDNEAIYDICRRNLDIERPTYTNLNRLISQIVSSITASLRFDGALNVDLTEFQTNLVPYPRIHFPLATYAPVISAEKAYHEQLTVAEITNACFEPANQMVKCDPRHGKYMACCLLYRGDVVPKDVNAAIATIKTKRTIQFVDWCPTGFKVGINYQPPTVVPGGDLAKVQRAVCMLSNTTAVAEAWARLDHKFDLMYAKRAFVHWYVGEGMEEGEFSEAREDMAALEKDYEEVGADSADGEDEGEEY

SEQ ID NO: 1805 - protein, 99 aa, Homo sapiens
LQEREEEVAAAAELAGVPSRRPGPPASRHGRPCGAEQLRAGWCATPESGGGEASGARGARPPPWTEARPCPSQAAWLLLLGPEGRRDNVVGQGLLVHPE

SEQ ID NO: 1806 - protein, 102 aa, Homo sapiens
LQEREEEVAAAAELAGVPSRRPGPPASRHGRPCGAEQLRAGWCATPESGGGEASGARGARPPPWTEARPCPSQAAWLLLLGPEGRRDNVVGQGLLVHPEWAP

SEQ ID NO: 1807 - protein, 306 aa, Homo sapiens [sequence omitted]

SEQ ID NO: 1808 - protein, 543 aa, Homo sapiens
LPSGPSAAMRSSVSRQTYSTKGGFSSNSASGGSGSQARTSFSSVTVSRSSGSGGGAHCGPGTGGFGSRSLYNLGGHKSISVSVAGGALLGRALGGFGFGSRAFMGQGAGRQTFGPACPPGGIQEVTVNQSLLTPLHVEIDPEIQRVRTQEREQIKTLNNKFASFIDKVRFLEQQNKVLETKWALLQEQGQNLGVTRNNLEPLFEAYLGSMRSTLDRLQSERGRLDSELRNVQDLVEDFKNKYEDEINKHTAAENEFVVLKKDVDAAYMGRMDLHGKVGTLTQEIDFLQQLYEMELSQVQTHVSNTNVVLSMDNNRNLDLDSIIAEVKAQYELIAQRSRAEAEAWYQTKYEELQVTAGKHGDNLRDTKNEIAELTRTIQRLQGEADAAKKQCQQLQTAIAEAEQRGELALKDAQKKLGDLDVALHQAKEDLTRLLRDYQELMNVKLALDVEIATYRKLLESEESRMSGECPSAVSISVTGNSTTVCGGGAASFGGGISLGGSGGATKGGFSTNVGYSTVKGGPVSAGTSILRKTTTVKTSSQRY

SEQ ID NO: 1809 - protein, 602 aa, Homo sapiens
VSPPAESVCGLGENVSDILGRSRGRAGSERPRDSPSLEPCPPRSPPVRRAPDIATLHPRDCPTPGPRGSAASLPPPTPAATAQFPQPDPVCRSQSLQAASGTFGGPVGRPGRAGTEPPRLGQWAWAGAVAEDLARPLQTPGDSHTAAAMATNKERLFAAGALGPGSGYPGAGFPFAFPGALRGSPPFEMLSPSFRGLGQPDLPKEMASLSVETQSTSSEEMVPSSPSPPPPPRVYKPCFVCNDKSSGYHYGVSSCEGCKGFFRRSIQKNMVYTCHRDKNCIINKVTRNRCQYCRLQKCFEVGMSKEAVRNDRNKKKKEVKEEGSPDSYELSPQLEELITKVSKAHQETFPSLCQLGKYTTNSSADHRVQLDLGLWDKFSELATKCIIKIVEFAKRLPGFTGLSIADQITLLKAACLDILMLRICTRYTPEQDTMTFSDGLTLNRTQMHNAGFGPLTDLVFAFAGQLLPLEMDDTETGLLSAICLICGDRMDLEEPEKVDKLQEPLLEALRLYARRRRPSQPYMFPRMLMKITDLRGISTKGAERAITLKMEIPGPMPPLIREMLENPEMFEDDSSQPGPHPNASSEDEVPGGQGKGGLKSPA

SEQ ID NO: 1810 - protein, 2135 aa, Homo sapiens
LYLGKRASSGALSGVMRSFKRVNFGTLLSSQKEAEELLPALKEFLSNPPAGFPSSRSDAERRQACDAILRACNQQLTAKLACPRHLGSLLELAELACDGYLVSTPQRPPLYLERILFVLLRNAAAQGSPEATLRLAQPLHACLVQCSREAAPQDYEAVARGSFSLLWKGAEALLERRAAFAARLKALSFLVLLEDESTPCEVPHFASPTACRAVAAHQLFDASGHGLNEADADFLDDLLSRHVIRALVGERGSSSGLLSPQRALCLLELTLEHCRRFCWSRHHDKAISAVEKAHSYLRNTNLAPSLQLCQLGVKLLQVGEEGPQAVAKLLIKASAVLSKSMEAPSPPLRALYESCQFFLSGLERGTKRRYRLDAILSLFAFLGGYCSLLQQLRDDGVYGGSSKQQQSFLQMYFQGLHLYTVVVYDFAQGCQIVDLADLTQLVDSCKSTVVWMLEALEGLSGQELTDHMGMTASYTSNLAYSFYSHKLYAEACAISEPLCQHLGLVKPGTYPEVPPEKLHRCFRLQVESLKKLGKQAQGCKMVILWLAALQPCSPEHMAEPVTFWVRVKMDAARAGDKELQLKTLRDSLSGWDPETLALLLREELQAYKAVRADTGQERFNIICDLLELSPEETPAGAWARATHLVELAQVLCYHDFTQQTNCSALDAIREALQLLDSVRPEAQARDQLLDDKAQALLWLYICTLEAKMQEGIERDRRAQAPGNLEEFEVNDLNYEDKLQEDRFLYSNIAFNLAADAAQSKCLDQALALWKELLTKGQAPAVRCLQQTAASLQILAALYQLVAKPMQALEVLLLLRIVSERLKDHSKAAGSSCHITQLLLTLGCPSYAQLHLEEAASSLKHLDQTTDTYLLLSLTCDLLRSQLYWTHQKVTKGVSLLLSVLRDPALQKSSKAWYLLRVQVLQLVAAYLSLPSNNLSHSLWEQLCAQGWQTPEIALIDSHKLLRSIILLLMGSDILSTQKAAVETSFLDYGENLVQKWQVLSEVLSCSEKLVCHLGRLGSVSEAKAFCLEALKLTTKLQIPRQCALFLVLKGELELARNDIDLCQSDLQQVLFLLESCTEFGGVTQHLDSVKKVHLQKGKQQAQVPCPPQLPEEELFLRGPALELVATVAKEPGPIAPSTNSSPVLKTKPQPIPNFLSHSPTCDCSLCASPVLTAVCLRWVLVTAGVRLAMGHQAQGLDLLQVVLKGCPEAAERLTQALQASLNHKTPPSLVPSLLDEILAQAYTLLALEGLNQPSNESLQKVLQSGLKFVAARIPHLEPWRASLLLIWALTKLGGLSCCTTQLFASSWGWQPPLIKSVPGSEPSKTQGQKRSGRGRQKLASAPLRLNNTSQKGLEGRGLPCTPKPPDRIRQAGPHVPFTVFEEVCPTESKPEVPQAPRVQQRVQTRLKVNFSDDSDLEDPVSAEAWLAEEPKRRGTASRGRGRARKGLSLKTDAVVAPGSAPGNPGLNGRSRRAKKVASRHCEERRPQRASDQARPGPEIMRTIPEEELTDNWRKMSFEILRGSDGEDSASGGKTPAPGPEAASGEWELLRLDSSKKKLPSPCPDKESDKDLGPRLRLPSAPVATGLSTLDSICDSLSVAFRGISHCPPSGLYAHLCRFLALCLGHRDPYATAFLVTESVSITCRHQLLTHLHRQLSKAQKHRGSLEIADQLQGLSLQEMPGDVPLARIQRLFSFRALESGHFPQPEKESFQERLALIPSGVTVCVLALATLQPGTVGNTLLLTRLEKDSPPVSVQIPTGQNKLHLRSVLNEFDAIQKAQKENSSCTDKREWWTGRLALDHRMEVLIASLEKSVLGCWKGLLLPSSEEPGPAQEASRLQELLQDCGWKYPDRTLLKIMLSGAGALTPQDIQALAYGLCPTQPERAQELLNEAVGRLQGLTVPSNSHLVLVLDKDLQKLPWESMPSLQALPVTRLPSFRFLLSYSIIKEYGASPVLSQGVDPRSTFYVLNPHNNLSSTEEQFRANFSSEAGWRGVVGEVPRPEQVQEALTKHDLYIYAGHGAGARFLDGQAVLRLSCRAVALLFGCSSAALAVRGNLEGAGIVLKYIMAGCPLFLGNLWDVTDRDIDRYTEALLQGWLGAGPGAPLLYYVNQARQAPRLKYLIGAAPIAYGLPVSLR

SEQ ID NO: 1811 - protein, 54 aa, Homo sapiens
LAESWLMLGWLVFPLILASQMYVPGKLHDVEHVLIDVGTGYYVEKVSESMWMPL

SEQ ID NO: 1812 - protein, 105 aa, Homo sapiens
LAESWLMLGWLVFPLILASQMYVPGKLHDVEHVLIDVGTGYYVEKTAEDAKDFFKRKIDFLTKQMEKIQPALQEKHAMKQAVMEMMSQKIQQLTALGAAQATAKA

SEQ ID NO: 1813 - protein, 349 aa, Homo sapiens
LADTFVSLLLSARGRRRRSIVKVSLHPAVMSKSESPKEPEQLRKLFIGGLSFETTDESLRSHFEQWGTLTDCVVMRDPNTKRSRGFGFVTYATVEEVDAAMNARPHKVDGRVVEPKRAVSREDSQRPGAHLTVKKIFVGGIKEDTEEHHLRDYFEQYGKIEVIEIMTDRGSGKKRGFAFVTFDDHDSVDKIVIQKYHTVNGHNCEVRKALSKQEMASASSSQRGRSGSGNFGGGRGGGFGGNDNFGRGGNFSGRGGFGGSRGGGGYGGSGDGYNGFGNDGSNFGGGGSYNDFGNYNNQSSNFGPMKGGNFGGRSSGPYGGGGQYFAKPRNQGGYGGSSSSSSYGSGRRF

SEQ ID NO: 1814 - protein, 200 aa, Homo sapiens
LGVQDQWAYLFISQVTILNGSDIRSLYNFSGEQMASYFGYAVAATDVNGDGLDDLLVGAPLLMDRTPDGRPQEVGRVYVYLQHPAGIEPTPTLTLTGHDEFGRFGSSLTPLGDLDQDGYNDVAIGAPFGGETQQGVVFVFPGGPGGLGSKPSQVLQPLWAASHTPDFFGSALRGGRDLDGNGYPGELCLRPLFTLKFPGH

SEQ ID NO: 1815 - protein, 95 aa, Homo sapiens
LAKLTRARGILRSIPTRGHGTGPCFPLLGPREPGSAFCRVPRPPLQGRADPTRWRFMENFQKVEKIGEGTYGVVYKARNKLTGEVVALKKIRLDT

SEQ ID NO: 1816 - protein, 482 aa, Homo sapiens
LGIVVRRPSRAARVWRPRGLVVPACPAPQPARSQLLALACLPAPLLARAFARPLLEDRGDSDHSLWLGRETEAAAAQGKRGCSGGSRKMSGEDEQQEQTIAEDLVVTKYKMGGDIANRVLRSLVEASSSGVSVLSLCEKGDAMIMEETGKIFKKEKEMKKGIAFPTSISVNNCVCHFSPLKSDQDYILKEGDLVKIDLGVHVDGFIANVAHTFVVDVAQGTQVTGRKADVIKAAHLCAEAALRLVKPGNQNTQVTEAWNKVAHSFNCTPIEGMLSHQLKQHVIDGEKTIIQNPTDQQKKDHEKAEFEVHEVYAVDVLVSSGEGKAKDAGQRTTIYKRDPSKQYGLKMKTSRAFFSEVERRFDAMPFTLRAFEDEKKARMGVVECAKHELLQPFNVLYEKEGEFVAQFKFTVLLMPNGPMRITSGPFEPDLYKSEMEVQDAELKALLQSSASRKTQKKKKKKASKTAENATSGETLEENEAGD

SEQ ID NO: 1817 - protein, 332 aa, Homo sapiens
LPAPLLARAFARPLLEDRGDSDHSLWLGRETEAAAAQGKRGCSGGSRKMSGEDEQQEQTIAEDLVVTKYKMGGDIANRVLRSLVEASSSGVSVLSLCEKGDAMIMEETGKIFKKEKEMKKGIAFPTSISVNNCVCHFSPLKSDQDYILKEGDLVKIDLGVHVDGFIANVAHTFVVDVAQGTQVTGRKADVIKAAHLCAEAALRLVKPGNQNTQVTEAWNKVAHSFNCTPIEGMLSHQLKQHVIDGEKTIIQNPTDQQKKDHEKAEFEVHEVYAVDVLVSSGEGKAKDAGQRTTIYKRDPSKQYGLKMKTSRAFFSEVERRFDAMFLNTLKMT

SEQ ID NO: 1818 - protein, 4552 aa, Homo sapiens
LLLASAHTMLTPPLLLLLPLLSALVAAAIDAPKTCSPKQFACRDQITCISKGWRCDGERDCPDGSDEAPEICPQSKAQRCQPNEHNCLGTELCVPMSRLCNGVQDCMDGSDEGPHCRELQGNCSRLGCQHHCVPTLDGPTCYCNSSFQLQADGKTCKDFDECSVYGTCSQLCTNTDGSFICGCVEGYLLQPDNRSCKAKNEPVDRPPVLLIANSQNILATYLSGAQVSTITPTSTRQTTAMDFSYANETVCWVHVGDSAAQTQLKCARMPGLKGFVDEHTINISLSLHHVEQMAIDWLTGNFYFVDDIDDRIFVCNRNGDTCVTLLDLELYNPKGIALDPAMGKVFFTDYGQIPKVERCDMDGQNRTKLVDSKIVFPHGITLDLVSRLVYWADAYLDYIEVVDYEGKGRQTIIQGILIEHLYGLTVFENYLYATNSDNANAQQKTSVIRVNRFNSTEYQVVTRVDKGGALHIYHQRRQPRVRSHACENDQYGKPGGCSDICLLANSHKARTCRCRSGFSLGSDGKSCKKPEHELFLVYGKGRPGIIRGMDMGAKVPDEHMIPIENLMNPRALDFHAETGFIYFADTTSYLIGRQKIDGTERETILKDGIHNVEGVAVDWMGDNLYWTDDGPKKTISVARLEKAAQTRKTLIEGKMTHPRAIVVDPLNGWMYWTDWEEDPKDSRRGRLERAWMDGSHRDIFVTSKTVLWPNGLSLDIPAGRLYWVDAFYDRIETILLNGTDRKIVYEGPELNHAFGLCHHGNYLFWTEYRSGSVYRLERGVGGAPPTVTLLRSERPPIFEIRMYDAQQQQVGTNKCRVNNGGCSSLCLATPGSRQCACAEDQVLDADGVTCLANPSYVPPPQCQPGEFACANSRCIQERWKCDGDNDCLDNSDEAPALCHQHTCPSDRFKCENNRCIPNRWLCDGDNDCGNSEDESNATCSARTCPPNQFSCASGRCIPISWTCDLDDDCGDRSDESASCAYPTCFPLTQFTCNNGRCININWRCDNDNDCGDNSDEAGCSHSCSSTQFKCNSGRCIPEHWTCDGDNDCGDYSDETHANCTNQATRPPGGCHTDEFQCRLDGLCIPLRWRCDGDTDCMDSSDEKSCEGVTHVCDPSVKFGCKDSARCISKAWVCDGDNDCEDNSDEENCESLACRPPSHPCANNTSVCLPPDKLCDGNDDCGDGSDEGELCDQCSLNNGGCSHNCSVAPGEGIVCSCPLGMELGPDNHTCQIQSYCAKHLKCSQKCDQNKFSVKCSCYEGWVLEPDGESCRSLDPFKPFIIFSNRHEIRRIDLHKGDYSVLVPGLRNTIALDFHLSQSALYWTDVVEDKIYRGKLLDNGALTSFEVVIQYGLATPEGLAVDWIAGNIYWVESNLDQIEVAKLDGTLRTTLLAGDIEHPRAIALDPRDGILFWTDWDASLPRIEAASMSGAGRRTVHRETGSGGWPNGLTVDYLEKRILWIDARSDAIYSARYDGSGHMEVLRGHEFLSHPFAVTLYGGEVYWTDWRTNTLAKANKWTGHNVTVVQRTNTQPFDLQVYHPSRQPMAPNPCEANGGQGPCSHLCLINYNRTVSCACPHLMKLHKDNTTCYEFKKFLLYARQMEIRGVDLDAPYYNYIISFTVPDIDNVTVLDYDAREQRVYWSDVRTQAIKRAFINGTGVETVVSADLPNAHGLAVDWVSRNLFWTSYDTNKKQINVARLDGSFKNAVVQGLEQPHGLVVHPLRGKLYWTDGDNISMANMDGSNRTLLFSGQKGPVGLAIDFPESKLYWISSGNHTINRCNLDGSGLEVIDAMRSQLGKATALAIMGDKLWWADQVSEKMGTCSKADGSGSVVLRNSTTLVMHMKVYDESIQLDHKGTNPCSVNNGDCSQLCLPTSETTRSCMCTAGYSLRSGQQACEGVGSFLLYSVHEGIRGIPLDPNDKSDALVPVSGTSLAVGIDFHAENDTIYWVDMGLSTISRAKRDQTWREDVVTNGIGRVEGIAVDWIAGNIYWTDQGFDVIEVARLNGSFRYVVISQGLDKPRAITVHPEKGYLFWTEWGQYPRIERSRLDGTERVVLVNVSISWPNGISVDYQDGKLYWCDARTDKIERIDLETGENREVVLSSNNMDMFSVSVFEDFIYWSDRTHANGSIKRGSKDNATDSVPLRTGIGVQLKDIKVFNRDRQKGTNVCAVANGGCQQLCLYRGRGQRACACAHGMLAEDGASCREYAGYLLYSERTILKSIHLSDERNLNAPVQPFEDPEHMKNVIALAFDYRAGTSPGTPNRIFFSDIHFGNIQQINDDGSRRITIVENVGSVEGLAYHRGWDTLYWTSYTTSTITRHTVDQTRPGAFERETVITMSGDDHPRAFVLDECQNLMFWTNWNEQHPSIMRAALSGANVLTLIEKDIRTPNGLAIDHRAEKLYFSDATLDKIERCEYDGSHRYVILKSEPVHPFGLAVYGEHIFWTDWVRRAVQRANKHVGSNMKLLRVDIPQQPMGIIAVANDTNSCELSPCRINNGGCQDLCLLTHQGHVNCSCRGGRILQDDLTCRAVNSSCRAQDEFECANGECINFSLTCDGVPHCKDKSDEKPSYCNSRRCKKTFRQCSNGRCVSNMLWCNGADDCGDGSDEIPCNKTACGVGEFRCRDGTCIGNSSRCNQFVDCEDASDEMNCSATDCSSYFRLGVKGVLFQPCERTSLCYAPSWVCDGANDCGDYSDERDCPGVKRPRCPLNYFACPSGRCIPMSWTCDKEDDCEHGEDETHCNKFCSEAQFECQNHRCISKQWLCDGSDDCGDGSDEAAHCEGKTCGPSSFSCPGTHVCVPERWLCDGDKDCADGADESIAAGCLYNSTCDDREFMCQNRQCIPKHFVCDHDRDCADGSDESPECEYPTCGPSEFRCANGRCLSSRQWECDGENDCHDQSDEAPKNPHCTSQEHKCNASSQFLCSSGRCVAEALLCNGQDDCGDSSDERGCHINECLSRKLSGCSQDCEDLKIGFKCRCRPGFRLKDDGRTCADVDECSTTFPCSQRCINTHGSYKCLCVEGYAPRGGDPHSCKAVTDEEPFLIFANRYYLRKLNLDGSNYTLLKQGLNNAVALDFDYREQMIYWTDVTTQGSMIRRMHLNGSNVQVLHRTGLSNPDGLAVDWVGGNLYWCDKGRDTIEVSKLNGAYRTVLVSSGLREPRALVVDVQNGYLYWTDWGDHSLIGRIGMDGSSRSVIVDTKITWPNGLTLDYVTERIYWADAREDYIEFASLDGSNRHVVLSQDIPHIFALTLFEDYVYWTDWETKSINRAHKTTGTNKTLLISTLHRPMDLHVFHALRQPDVPNHPCKVNNGGCSNLCLLSPGGGHKCACPTNFYLGSDGRTCVSNCTASQFVCKNDKCIPFWWKCDTEDDCGDHSDEPPDCPEFKCRPGQFQCSTGICTNPAFICDGDNDCQDNSDEANCDIHVCLPSQFKCTNTNRCIPGIFRCNGQDNCGDGEDERDCPEVTCAPNQFQCSITKRCIPRVWVCDRDNDCVDGSDEPANCTQMTCGVDEFRCKDSGRCIPARWKCDGEDDCGDGSDEPKEECDERTCEPYQFRCKNNRCVPGRWQCDYDNDCGDNSDEESCTPRPCSESEFSCANGRCIAGRWKCDGDHDCADGSDEKDCTPRCDMDQFQCKSGHCIPLRWRCDADADCMDGSDEEACGTGVRTCPLDEFQCNNTLCKPLAWKCDGEDDCGDNSDENPEECARFVCPPNRPFRCKNDRVCLWIGRQCDGTDNCGDGTDEEDCEPPTAHTTHCKDKKEFLCRNQRCLSSSLRCNMFDDCGDGSDEEDCSIDPKLTSCATNASICGDEARCVRTEKAAYCACRSGFHTVPGQPGCQDINECLRFGTCSQLCNNTKGGHLCSCARNFMKTHNTCKAEGSEYQVLYIADDNEIRSLFPGHPHSAYEQAFQGDESVRIDAMDVHVKAGRVYWTNWHTGTISYRSLPPAAPPTTSNRHRRQIDRGVTHLNISGLKMPRGIAIDWVAGNVYWTDSGRDVIEVAQMKGENRKTLISGMIDEPHAIVVDPLRGTMYWSDWGNHPKIETAAMDGTLRETLVQDNIQWPTGLAVDYHNERLYWADAKLSVIGSIRLNGTDPIVAADSKRGLSHPFSIDVFEDYIYGVTYINNRVFKIHKFGHSPLVNLTGGLSHASDVVLYHQHKQPEVTNPCDRKKCEWLCLLSPSGPVCTCPNGKRLDNGTCVPVPSPTPPPDAPRPGTCNLQCFNGGSCFLNARRQPKCRCQPRYTGDKCELDQCWEHCRNGGTCAASPSGMPTCRCPTGFTGPKCTQQVCAGYCANNSTCTVNQGNQPQCRCLPGFLGDRCQYRQCSGYCENFGTCQMAADGSRQCRCTAYFEGSRCEVNKCSRCLEGACVVNKQSGDVTCNCTDGRVAPSCLTCVGHCSNGGSCTMNSKMMPECQCPPHMTGPRCEEHVFSQQQPGHIASILIPLLLLLLLVLVAGVVFWYKRRVQGAKGFQHQRMTNGAMNVEIGNPTYKMYEGGEPDDVGGLLDADFALDPDKPTNFTNPVYATLYMGGHGSRHSLASTDEKRELLGRGPEDEIGDPLA

SEQ ID NO: 1819 - protein, 20 aa, Homo sapiens
MLYFSLFWAARILWGSRGGG

SEQ ID NO: 1820 - protein, 224 aa, Homo sapiens
LPLPPLTGVSVYGALQEDPLVPPLQRCGQLVRMAIRAQHSNAAQTQTGEANRGWTGQESLSDSDPEMWELLQREKDRQCRGLELIASENFCSRAALEALGSCLNNKYSEGYPGKRYYGGAEVVDEIELLCQRRALEAFDLDPAQWGVNVQPYSGSPANLAVYTALLQPHDRIMGLDLPDGGHLTHGYMSDVKRISATSIFFESMPYKLNGFSCLCVCPAQNWPH

SEQ ID NO: 1821 - protein, 236 aa, Homo sapiens
LVLSEWSFLQGVLPLSALALAGRDCGSPGEGAQYLLTLPPTTPELLQPSCAGGPGVLSEQQVLGGLSWQEVRAGGQCQGWCSQWGNPPVPSQCSLRSELPSPLLMVESPFSVPSLPLSHGRYYGGAEVVDEIELLCQRRALEAFDLDPAQWGVNVQPYSGSPANLAVYTALLQPHDRIMGLDLPDGGHLTHGYMSDVKRISATSIFFESMPYKLNVSALGCGEGLLALVVVLPWRS

SEQ ID NO: 1822 - protein, 450 aa, Homo sapiens
VRAWDLNMDFPCLWLGLLLPLVAALDFNYHRQEGMEAFLKTVAQNYSSVTHLHSIGKSVKGRNLWVLVVGRFPKEHRIGIPEFKYVANMHGDETVGRELLLHLIDYLVTSDGKDPEITNLINSTRIHIMPSMNPDGFEAVKKPDCYYSIGRENYNQYDLNRNFPDAFEYNNVSRQPETVAVMKWLKTETFVLSANLHGGALVASYPFDNGVQATGALYSRSLTPDDDVFQYLAHTYASRNPNMKKGDECKNKMNFPNGVTNGYSWYPLQGGMQDYNYIWAQCFEITLELSCCKYPREEKLPSFWNNNKASLIEYIKQVHLGVKGQVFDQNGNPLPNVIVEVQDRKHICPYRTNKYGEYYLLLLPGSYIINVTVPGHDPHITKVIIPEKSQNFSALKKDILLPFQGQLDSIPVSNPSCPMIPLYRNLPDHSAATKPSLFLFLVSLLHIFFK

SEQ ID NO: 1823 - protein, 456 aa, Homo sapiens
LEWGSYDLQSNKNMDFPCLWLGLLLPLVAALDFNYHRQEGMEAFLKTVAQNYSSVTHLHSIGKSVKGRNLWVLVVGRFPKEHRIGIPEFKYVANMHGDETVGRELLLHLIDYLVTSDGKDPEITNLINSTRIHIMPSMNPDGFEAVKKPDCYYSIGRENYNQYDLNRNFPDAFEYNNVSRQPETVAVMKWLKTETFVLSANLHGGALVASYPFDNGVQATGALYSRSLTPDDDVFQYLAHTYASRNPNMKKGDECKNKMNFPNGVTNGYSWYPLQGGMQDYNYIWAQCFEITLELSCCKYPREEKLPSFWNNNKASLIEYIKQVHLGVKGQVFDQNGNPLPNVIVEVQDRKHICPYRTNKYGEYYLLLLPGSYIINVTVPGHDPHITKVIIPEKSQNFSALKKDILLPFQGQLDSIPVSNPSCPMIPLYRNLPDHSAATKPSLFLFLVSLLHIFFK

SEQ ID NO: 1824 - protein, 93 aa, Homo sapiens
MEELPTIIADNAGYDSADLVAQLRAAHSEGNTTAGLDMREGTIGDMAILGITESFQVKRQVLLSAAEAAEVILRVDNIIKAAPRKRVPDHHPC

SEQ ID NO: 1825 - protein, 19 aa, Homo sapiens
VNFLGAMMYCNFILMYFDL

SEQ ID NO: 1826 - protein, 358 aa, Homo sapiens
LTTRQLTVQMMQNPQILAALQERLDGLVETPTGYIESLPRVVKRRVNALKNLQVKCAQIEAKFYEEVHDLERKYAVLYQPLFDKRFEIINAIYEPTEEECEWKPDEEDEISELKEKAKIEDEKKDEEKEDPKGIPEFWLTVFKNVDLLSDMVQEHDEPILKHLKDIKVKFSDAGQPMSFVLEFHFEPNEYFTNEVLTKTYRMRSEPDDSDPFSFDGPEIMGCTGCQIDWKKGKNVTLKTIKKKQKHKGRGTVRTVTKTVSNDSFFNFFAPPEVPESGDLDDDAEAILAADFEIGHFLRERIIPRSVLYFTGEAIEDDDDDYDEEGEEADEEGEEEGDEENDPDYDPKKDQNPAECKQQ

SEQ ID NO: 1827 - protein, 78 aa, Homo sapiens
LLSFLFIVISFLNFAVPESGDLDDDAEAILAADFEIGHFLRERIIPRSVLYFTGEAIEDDDDDYDEEGEEADEVMFTK

SEQ ID NO: 1828 - protein, 380 aa, Homo sapiens
LSHCLRSSGRLAPHTSRRKEQSELDQDLDDVEEVEEEETGEETKLKARQLTVQMMQNPQILAALQERLDGLVETPTGYIESLPRVVKRRVNALKNLQVKCAQIEAKFYEEVHDLERKYAVLYQPLFDKRFEIINAIYEPTEEECEWKPDEEDEISEELKEKAKIEDEKKDEEKEDPKGIPEFWLTVFKNVDLLSDMVQEHDEPILKHLKDIKVKFSDAGQPMSFVLEFHFEPNEYFTNEVLTKTYRMRSEPDDSDPFSFDGPEIMGCTGCQIDWKKGKNVTLKTIKKKQKHKGRGTVRTVTKTVSNDSFFNFFAPPEVPESGDLDDDAEAILAADFEIGHFLRERIIPRSVLYFTGEAIEDDDDDYDEEGEEADEVMFTK

SEQ ID NO: 1829 - protein, 44 aa, Homo sapiens [sequence omitted]

SEQ ID NO: 1830 - protein, 55 aa, Homo sapiens
MCLALQQFLLAASAGLLSLCVAPGVKMTPAVCTRQGYQVRNWLILTERFAPFSLE

SEQ ID NO: 1831 - protein, 371 aa, Homo sapiens
LQLQGVELVKLMSTVICMKQREEEFLLTIRPFANRMQKSPCYIPIVSSATLWDRSTPSAKHIPCYERTSVPCSRFINHMKNFSESPKFRSLHFLNFPVFPERTQNSMACKRLLHTCQYIVPRCSVSTVSFDEESYEEFRSSPAPSSETDEAPLIFTARGETEERARGAPKQAWNSSFLEQLVKKPNWAHSVNPVHLEAQGIHISRHTRPKGQPLSSPKKNSGSAARPSTAIGLCRRSQTPGALQSTGPSNTELEPEERMAVPAGAQAHPDDIQSRLLGASGNPVGKGAVAMAPEMLPKHPHTPRDRRPQADTSLHGNLAGAPLPLLAGASTHFPSKRLIKVCSSAPPRPTRRFHTVCSQALSRPVVNAHLH

SEQ ID NO: 1832 - protein, 522 aa, Homo sapiens
VAGAVAAARAPPPHGAQCQAGGGSGWRLRPALQRGLRRRRLRHLGPDTMRRVVRQSKFRHVFGQAVKNDQCYDDIRVSRVTWDSSFCAVNPRFVAIIIEASGGGAFLVLPLHKTGRIDKSYPTVCGHTGPVLDIDWCPHNDQVIASGSEDCTVMVWQIPENGLTLSLTEPVVILEGHSKRVGIVAWHPTARNVLLSAGCDNAIIIWNVGTGEALINLDDMHSDMIYNVSWNRNGSLICTASKDKKVRVIDPRKQEIVAEKEKAHEGARPMRAIFLADGNVFTTGFSRMSERQLALWNPKNMQEPIALHEMDTSNGVLLPFYDPDTSIIYLCGKGDSSIRYFEITDESPYVHYLNTFSSKEPQRGMGYMPKRGLDVNKCEIARFFKLHERKCEPIIMTVPRKSDLFQDDLYPDTAGPEAALEAEEWFEGKNADPILISLKHGYIPGKNRDLKVVKKNILDSKPTANKKCDLISIPKKTTDTASVQNEAKLDEILKEIKSIKDTICNQDERISKLEQQMAKIAA

SEQ ID NO: 1833 - protein, 2192 aa, Homo sapiens
MVLLLCLSCLIFSCLTFSWLKIWGKMTDSKPITKSKSEANLIPSQEPFPASDNSGETPQRNGEGHTLPKTPSQAEPASHKGPKDAGRRRNSLPPSHQKPPRNPLSSSDAAPSPELQANGTGTQGLEATDTNGLSSSARPQGQQAGSPSKEDKKQANIKRQLMTNFILGSFDDYSSDEDSVAGSSRESTRKGSRASLGALSLEAYLTTGEAETRVPTMRPSMSGLHLVKRGREHKKLDLHRDFTVASPAEFVTRFGGDRVIEKVLIANNGIAAVKCMRSIRRWAYEMFRNERAIRFVVMVTPEDLKANAEYIKMADHYVPVPGGPNNNNYANVELIVDIAKRIPVQAVWAGWGHASENPKLPELLCKNGVAFLGPPSEAMWALGDKIASTVVAQTLQVPTLPWSGSGLTVEWTEDDLQQGKRISVPEDVYDKGCVKDVDEGLEAAERIGFPLMIKASEGGGGKGIRKAESAEDFPILFRQVQSEIPGSPIFLMKLAQHARHLEVQILADQYGNAVSLFGRDCSIQRRHQKIVEEAPATIAPLAIFEFMEQCAIRLAKTVGYVSAGTVEYLYSQDGSFHFLELNPRLQVEHPCTEMIADVNLPAAQLQIAMGVPLHRLKDIRLLYGESPWGVTPISFETPSNPPLARGHVIAARITSENPDEGFKPSSGTVQELNFRSSKNVWGYFSVAATGGLHEFADSQFGHCFSWGENREEAISNMVVALKELSIRGDFRTTVEYLINLLETESFQNNDIDTGWLDYLIAEKVQAEKPDIMLGVVCGALNVADAMFRTCMTDFLHSLERGQVLPADSLLNLVDVELIYGGVKYILKVARQSLTMFVLIMNGCHIEIDAHRLNDGGLLLSYNGNSYTTYMKEEVDSYRITIGNKTCVFEKENDPTVLRSPSAGKLTQYTVEDGGHVEAGSSYAEMEVMKMIMTLNVQERGRVKYIKRPGAVLEAGCVVARLELDDPSKVHPAEPFTGELPAQQTLPILGEKLHQVFHSVLENLTNVMSGFCLPEPVFSIKLKEWVQKLMMTLRHPSLPLLELQEIMTSVAGRIPAPVEKSVRRVMAQYASNITSVLCQFPSQQIATILDCHAATLQRKADREVFFINTQSIVQLVQRYRSGIRGYMKTVVLDLLRRYLRVEHHFQQAHYDKCVINLREQFKPDMSQVLDCIFSHAQVAKKNQLVIMLIDELCGPDPSLSDELISILNELTQLSKSEHCKVALRARQILIASHLPSYELRHNQVESIFLSAIDMYGHQFCPENLKKLILSETTIFDVLPTFFYHANKVVCMASLEVYVRRGYIAYELNSLQHRQLPDGTCVVEFQFMLPSSHPNRMTVPISITNPDLLRHSTELFMDSGFSPLCQRMGAMVAFRRFEDFTRNFDEVISCFANVPKDTPLFSEARTSLYSEDDCKSLREEPIHILNVSIQCADHLEDEALVPILRTFVQSKKNILVDYGLRRITFLIAQEKEFPKFFTFRARDEFAEDRIYRHLEPALAFQLELNRMRNFDLTAVPCANHKMHLYLGAAKVKEGVEVTDHRFFIRAIIRHSDLITKEASFEYLQNEGERLLLEAMDELEVAFNNTSVRTDCNHIFLNFVPTVIMDPFKIEESVRYMVMRYGSRLWKLRVLQAEVKINIRQTTTGSAVPIRLFITNESGYYLDISLYKEVTDSRSGNIMFHSFGNKQGPQHGMLINTPYVTKDLLQAKRFQAQTLGTTYIYDFPEMFRQALFKLWGSPDKYPKDILTYTELVLDSQGQLVEMNRLPGGNEVGMVAFKMRFKTQEYPEGRDVIVIGNDITFRIGSFGPGEDLLYLRASEMARAEGIPKIYVAANSGARIGMAEEIKHMFHVAWVDPEDPHKGFKYLYLTPQDYTRISSLNSVHCKHIEEGGESRYMITDIIGKDDGLGVENLRGSGMIAGESSLAYEEIVTISLVTCRAIGIGAYLVRLGQRVIQVENSHIILTGASALNKVLGREVYTSNNQLGGVQIMHYNGVSHITVPDDFEGVYTILEWLSYMPKDNHSPVPIITPTDPIDREIEFLPSRAPYDPRWMLAGRPHPTLKGTWQSGFFDHGSFKEIMAPWAQTVVTGRARLGGIPVGVIAVETRTVEVAVPADPANLDSEAKIIQQAGQVWFPDSAYKTAQAVKDFNREKLPLMIFANWRGFSGGMKGCLGTWRDVSWWKIRAMLPMHIGEGSV

SEQ ID NO: 1834 - protein, 212 aa, Homo sapiens
VMPREDRATWKSNYFLKIIQLLDDYPKCFIVGADNVGSKQMQQIRMSLRGKAVVLMGKNTMMRKAIRGHLENNPALEKLLPHIRGNVGFVFTKEDLTEIRDMLLANKVRGQLGWLKRLCCCSLKQNGPFSGCVSGEAFLTVCCLCQVPAAARAGAIAPCEVTVPAQNTGLGPEKTSFFQALGITTKISRGTIEILVSGPGLPVLTRQMGSCF

SEQ ID NO: 1835 - protein, 173 aa, Homo sapiens
VMPREDRATWKSNYFLKIIQLLDDYPKCFIVGADNVGSKQMQQIRMSLRGKAVVLMGKNTMMRKAIRGHLENNPALEKLLPHIRGNVGFVFTKEDLTEIRDMLLANKVPAAARAGAIAPCEVTVPAQNTGLGPEKTSFFQALGITTKISRGTIEILVSGPGLPVLTRQMGSCF

SEQ ID NO: 1836 - protein, 413 aa, Homo sapiens
LPSCFSVGPPMSAPSSTGPQYCPGLPSRKEATPEGRPETCLLPSSPQAQRPIQGLEQRADGERCWAAGWPRDGGRSSPGGQDEGGGSWPLEEVVLLVSISSSVQEGEKYPHPCAARHRTPSLRSPDQPPPCPQFMAQGKTGSSSPPGGPPKPGSQLDSMLGSLQSDLNKLGVATVAKGVCGACKKPIAGQVVTAMGKTWHPEHFVCTHCQEEIGSRNFFERDGQPYCEKDYHNLFSPRCYYCNGPILDKVVTALDRTWHPEHFFCAQCGAFFGPEGFHEKDGKAYCRKDYFDMFAPKCGGCARAILENYISALNTLWHPECFVCRECFTPFVNGSFFEHDGQPYCEVHYHERRGSLCSGCQKPITGRCITAMAKKFHPEHFVCAFCLKQLNKGTFKEQNDKPYCQNCFLKLFC

SEQ ID NO: 1837 - protein, 62 aa, Homo sapiens
LWFCSSGIRGPAYSLLNGDPPTPRLIKGDGEVLEEIVTKERHREINKVGVAPLPAIRPQLCL

SEQ ID NO: 1838 - protein, 118 aa, Homo sapiens
VCERETVWLWGRQAGSCRGGLAGSVHSPSTSMATSSQYRQLLSDYGPPSLGYTQGTGNSQVPQSKYAELLAIIEELGKEIRPTYAGSKSAMERLKRGIIHARGLVRECLAETERNARS

SEQ ID NO: 1839 - protein, 252 aa, Homo sapiens
LWGGHVGRWGRGSGAAMGCGAARALASVLCLRRNAAMAAQGEPQVQFKLVLVGDGGTGKTTFVKRHLTGEFEKKYVATLGVEVHPLVFHTNRGPIKFNVWDTAGQEKFGGLRDGYYIQAQCAIIMFDVTSRVTYKNVPNWHRDLVRVCENIPIVLCGNKVDIKDRKVKAKSIVFHRKKNLQYYDISAKSNYNFEKPFLWLARKLIGDPNLEFVAMPALAPPEVVMDPALAAQYEHDLEVAQTTALPDEDDDL

SEQ ID NO: 1840 - protein, 235 aa, Homo sapiens
LDIPRLISPGLTPSLLFILVLQKPSPLMAPLGEVGNYFGVQDAVPFGNVPVLPVDSPVLLSDHLGQSEAGGLPRGPAVTDLDHLKGILRRRQLYCRTGFHLEIFPNGTIQGTRKDHSRFGILEFISIAVGLVSIRGVDSGLYLGMNEKGELYGSEKLTQECVFREQFEENWYNTYSSNLYKHVDTGRRYYVALNKDGTPREGTRTKRHQKFTHFLPRPVDPDKVPELYKDILSQS

SEQ ID NO: 1841 - protein, 763 aa, Homo sapiens
LLFIEVRGRLGARQADTPLGSSPAAAAARSGLRGSGAAASGRLAARITRGSGCLLAGAARRALRARGRRRRTRGRTLAAGSLAAGSAGTGRAGRVALTMVSYWDTGVLLCALLSCLLLTGSSSGSKLKDPELSLKGTQHIMQAGQTLHLQCRGEAAHKWSLPEMVSKESERLSITKSACGRNGKQFCSTLTLNTAQANHTGFYSCKYLAVPTSKKKETESAIYIFISDTGRPFVEMYSEIPEIIHMTEGRELVIPCRVTSPNITVTLKKFPLDTLIPDGKRIIWDSRKGFIISNATYKEIGLLTCEATVNGHLYKTNYLTHRQTNTIIDVQISTPRPVKLLRGHTLVLNCTATTPLNTRVQMTWSYPDEKNKRASVRRRIDQSNSHANIFYSVLTIDKMQNKDKGLYTCRVRSGPSFKSVNTSVHIYDKAFITVKHRKQQVLETVAGKRSYRLSMKVKAFPSPEVVWLKDGLPATEKSARYLTRGYSLIIKDVTEEDAGNYTILLSIKQSNVFKNLTATLIVNVKPQIYEKAVSSFPDPALYPLGSRQILTCTAYGIPQPTIKWFWHPCNHNHSEARCDFCSNNEESFILDADSNMGNRIESITQRMAIIEGKNKMASTLVVADSRISGIYICIASNKVGTVGRNISFYITDVPNGFHVNLEKMPTEGEDLKLSCTVNKFLYRDVTWILLRTVNNRTMHYSISKQKMAITKEHSITLNLTIMNVSLQDSGTYACRARNVYTGEEILQKKEITIRGSEEMLLPK

SEQ ID NO: 1842 - protein, 944 aa, Homo sapiens
VRSDLRRLSPAFSQGFLSASRRCPRGSRRLLTGRGCLCVLLSVRGTARPRGPEQNAARAESGGRRSRQGAGGRRPRPEAEADREPAMSVVGLDVGSQSCYIAVARAGGIETIANEFSDRCTPSVISFGSKNRTIGVAAKNQQITHANNTVSNFKRFHGRAFNDPFIQKEKENLSYDLVPLKNGGVGIKVMYMGEEHLFSVEQITAMLLTKLKETAENSLKKPVTDCVISVPSFFTDAERRSVLDAAQIVGLNCLRLMNDMTAVALNYGIYKQDLPSLDEKPRIVVFVDMGHSAFQVSACAFNKGKLKVLGTAFDPFLGGKNFDEKLVEHFCAEFKTKYKLDAKSKIRALLRLYQECEKLKKLMSSNSTDLPLNIECFMNDKDVSGKMNRSQFEELCAELLQKIEVPLYSLLEQTHLKVEDVSAVEIVGGATRIPAVKERIAKFFGKDISTTLNADEAVARGCALQCAILSPAFKVREFSVTDAVPFPISLIWNHDSEDTEGVHEVFSRNHAAPFSKVLTFLRRGPFELEAFYSDPQGVPYPEAKIGRFVVQNVSAQKDGEKSRVKVKVRVNTHGIFTISTASMVEKVPTEENEMSSEADMECLNQRPPENPDTDKNVQQDNSEAGTQPQVQTDAQQTSQSPPSPELTSEENKIPDADKANEKKVDQPPEAKKPKIKVVNVELPIEANLVWQLGKDLLNMYIETEGKMIMQDKLEKERNDAKNAVEEYVYEFRDKLCGPYEKFICEQDHQNFLRLLTETEDWLYEEGEDQAKQAYVDKLEELMKIGTPVKVRFQEAEERPKMFEELGQRLQHYAKIAADFRNKDEKYNHIDESEMKKVEKSVNEVMEWMNNVMNAQAKKSLDQDPVVRAQEIKTKIKELNNTCEPVVTQPKPKIESPKLERTPNGPNIDKKEEDLEDKNNFGAEPPHQNGECYPNEKNSVNMDLD

SEQ ID NO: 1843 - protein, 900 aa, Homo sapiens
VRSDLRRLSPAFSQGFLSASRRCPRGSRRLLTGRGCLCVLLSVRGTARPRGPEQNAARAESGGRRSRQGAGGRRPRPEAEADREPAMSVVGLDVGSQSCYIAVARAGGIETIANEFSDRCTPSVISFGSKNRTIGVAAKNQQITHANNTVSNFKRFHGRAFNDPFIQKEKENLSYDLVPLKNGGVGIKVMYMGEEHLFSVEQITAMLLTKLKETAENSLKKPVTDCVISVPSFFTDAERRSVLDAAQIVGLNCLRLMNDMTAVALNYGIYKQDLPSLDEKPRIVVFVDMGHSAFQVSACAFNKGKLKVLGTAFDPFLGGKNFDEKLVEHFCAEFKTKYKLDAKSKIRALLRLYQECEKLKKLMSSNSTDLPLNIECFMNDKDVSGKMNRSQFEELCAELLQKIEVPLYSLLEQTHLKVEDVSAVEIVGGATRIPAVKERIAKFFGKDISTTLNADEAVARGCALQCAILSPAFKVREFSVTDAVPFPISLIWNHDSEDTEGVHEVFSRNHAAPFSKVLTFLRRGPFELEAFYSDPQGVPYPEAKIGRFVVQNVSAQKDGEKSRVKVKVRVNTHGIFTISTASMVEKVPTEENEMSSEADMECLNQRPPENPDTDANEKKVDQPPEAKKPKIKVVNVELPIEANLVWQLGKDLLNMYIETEGKMIMQDKLEKERNDAKNAVEEYVYEFRDKLCGPYEKFICEQDHQNFLRLLTETEDWLYEEGEDQAKQAYVDKLEELMKIGTPVKVRFQEAEERPKMFEELGQRLQHYAKIAADFRNKDEKYNHIDESEMKKVEKSVNEVMEWMNNVMNAQAKKSLDQDPVVRAQEIKTKIKELNNTCEPVVTQPKPKIESPKLERTPNGPNIDKKEEDLEDKNNFGAEPPHQNGECYPNEKNSVNMDLD

SEQ ID NO: 1844 - protein, 820 aa, Homo sapiens
LESFFVACFIRAAKRLWLGREWAEAGLSQWHGSGPVAAMATAAVLRGPAAHWVESFQKAREEGSGSGTWRGRWRRRSVISFGSKNRTIGVAAKNQQITHANNTVSNFKRFHGRAFNDPFIQKEKENLSYDLVPLKNGGVGIKVMYMGEEHLFSVEQITAMLLTKLKETAENSLKKPVTDCVISVLGTAFDPFLGGKNFDEKLVEHFCAEFKTKYKLDAKSKIRALLRLYQECEKLKKLMSSNSTDLPLNIECFMNDKDVSGKMNRSQFEELCAELLQKIEVPLYSLLEQTHLKVEDVSAVEIVGGATRIPAVKERIAKFFGKDISTTLNADEAVARGCALQCAILSPAFKVREFSVTDAVPFPISLIWNHDSEDTEGVHEVFSRNHAAPFSKVLTFLRRGPFELEAFYSDPQGVPYPEAKIGRFVVQNVSAQKDGEKSRVKVKVRVNTHGIFTISTASMVEKVPTEENEMSSEADMECLNQRPPENPDTDKNVQQDNSEAGTQPQVQTDAQQTSQSPPSPELTSEENKIPDADKANEKKVDQPPEAKKPKIKVVNVELPIEANLVWQLGKDLLNMYIETEGKMIMQDKLEKERNDAKNAVEEYVYEFRDKLCGPYEKFICEQDHQNFLRLLTETEDWLYEEGEDQAKQAYVDKLEELMKIGTPVKVRFQEAEERPKMFEELGQRLQHYAKIAADFRNKDEKYNHIDESEMKKVEKSVNEVMEWMNNVMNAQAKKSLDQDPVVRAQEIKTKIKELNNTCEPVVTQPKPKIESPKLERTPNGPNIDKKEEDLEDKNNFGAEPPHQNGECYPNEKNSVNMDLD

SEQ ID NO: 1845 - protein, 898 aa, Homo sapiens
LESFFVACFIRAAKRLWLGREWAEAGLSQWHGSGPVAAMATAAVLRGPAAHWVESFQKAREEGSGSGTWRGRWRRRSVISFGSKNRTIGVAAKNQQITHANNTVSNFKRFHGRAFNDPFIQKEKENLSYDLVPLKNGGVGIKVMYMGEEHLFSVEQITAMLLTKLKETAENSLKKPVTDCVISVPSFFTDAERRSVLDAAQIVGLNCLRLMNDMTAVALNYGIYKQDLPSLDEKPRIVVFVDMGHSAFQVSACAFNKGKLKVLGTAFDPFLGGKNFDEKLVEHFCAEFKTKYKLDAKSKIRALLRLYQECEKLKKLMSSNSTDLPLNIECFMNDKDVSGKMNRSQFEELCAELLQKIEVPLYSLLEQTHLKVEDVSAVEIVGGATRIPAVKERIAKFFGKDISTTLNADEAVARGCALQCAILSPAFKVREFSVTDAVPFPISLIWNHDSEDTEGVHEVFSRNHAAPFSKVLTFLRRGPFELEAFYSDPQGVPYPEAKIGRFVVQNVSAQKDGEKSRVKVKVRVNTHGIFTISTASMVEKVPTEENEMSSEADMECLNQRPPENPDTDKNVQQDNSEAGTQPQVQTDAQQTSQSPPSPELTSEENKIPDADKANEKKVDQPPEAKKPKIKVVNVELPIEANLVWQLGKDLLNMYIETEGKMIMQDKLEKERNDAKNAVEEYVYEFRDKLCGPYEKFICEQDHQNFLRLLTETEDWLYEEGEDQAKQAYVDKLEELMKIGTPVKVRFQEAEERPKMFEELGQRLQHYAKIAADFRNKDEKYNHIDESEMKKVEKSVNEVMEWMNNVMNAQAKKSLDQDPVVRAQEIKTKIKELNNTCEPVVTQPKPKIESPKLERTPNGPNIDKKEEDLEDKNNFGAEPPHQNGECYPNEKNSVNMDLD

SEQ ID NO: 1846 - protein, 201 aa, Homo sapiens
VRSDLRRLSPAFSQGFLSASRRCPRGSRRLLTGRGCLCVLLSVRGTARPRGPEQNAARAESGGRRSRQGAGGRRPRPEAEADREPAMSVVGLDVGSQSCYIAVARAGGIETIANEFSDRCTPSVISFGSKNRTIGVAAKNQQITHANNTVSNFKRFHGRAFNDPFIQKEKENLSYDLVPLKNGGVGIKSPPSLQMLRGDLC

SEQ ID NO: 1847 - protein, 17 aa, Homo sapiens
LSCVLDSFRHHHVEGFL

SEQ ID NO: 1848 - protein, 206 aa, Homo sapiens
VPGARAQLWCATEGQIPRAAAGAGNAGNGGARRTVMGGSVYPADDEMFSDIYKIREIADGLCLEVEGKMVSRTEGNIDDSLIGGNASAEGPEGEGTESTVITGVDIVMNHHLQETSFTKEAYKKYIKDYMKSIKGKLEEQRPERVKPFMTGAAEQIKHILANFKNYQFFIGENMNPDGMVALLDYREDGVTPYMIFFKDGLEMEKC

SEQ ID NO: 1849 - protein, 1230 aa, Homo sapiens
LFGWRTPGVKPVVDPSASSLRLAEWPPSFRSPELRGKMERHQPRLHHPAQGSAAGTPYPSSASLRGCRESKMPRRKGPQHPPPPSGPEEPGEKRPKFHLNIRTLTDDMLDKFASIRIPGSKKERPPLPNLKTAFASSDCSAAPLEMMENFPKPLSENELLELFEKMMEDMNLNEDKKAPLREKDFSIKKEMVMQYINTASKTGSLKRSRQISPQEFIHELKMGSADERLVTCLESLRVSLTSNPVSWVESFGHEGLGLLLDILEKLISGKIQEKVVKKNQHKVIQCLKALMNTQYGLERIMSEERSLSLLAKAVDPRHPNMMTDVVKLLSAVCIVGEESILEEVLEALTSAGEEKKIDRFFCIVEGLRHNSVQLQVACMQLINALVTSPDDLDFRLHIRNEFMRCGLKEILPNLKCIKNDGLDIQLKVFDEHKEEDLFELSHRLEDIRAELDEAYDVYNMVWSTVKETRAEGYFISILQHLLLIRNDYFIRQQYFKLIDECVSQIVLHRDGMDPDFTYRKRLDLDLTQFVDICIDQAKLEEFEEKASELYKKFEKEFTDHQETQAELQKKEAKINELQAELQAFKSQFGALPADCNIPLPPSKEGGTGHSALPPPPPLPSGGGVPPPPPPPPPPPLPGMRMPFSGPVPPPPPLGFLGGQNSPPLPILPFGLKPKKEFKPEISMRRLNWLKIRPHEMTENCFWIKVNENKYENVDLLCKLENTFCCQQKERREEEDIEEKKSIKKKIKELKFLDSKIAQNLSIFLSSFRVPYEEIRMMILEVDETRLAESMIQNLIKHLPDQEQLNSLSQFKSEYSNLCEPEQFVVVMSNVKRLRPRLSAILFKLQFEEQVNNIKPDIMAVSTACEEIKKSKSFSKLLELVLLMGNYMNAGSRNAQTFGFNLSSLCKLKDTKSADQKTTLLHFLVEICEEKYPDILNFVDDLEPLDKASKVSVETLEKNLRQMGRQLQQLEKELETFPPPEDLHDKFVTKMSRFVISAKEQYETLSKLHENMEKLYQSIIGYYAIDVKKVSVEDFLTDLNNFRTTFMQAIKENIKKREAEEKEKRVRIAKELAERERLERQQKKKRLLEMKTEGDETGVMDNLLEALQSGAAFRDRRKRTPMPKDVRQSLSPMSQRPVLKVCNHENQKVQLTEGSRSHYNINCNSTRTPVAKELNYNLDTHTSTGRIKAAEKKEACNVESNRKKETELLGSFSKNESVPEVEALLARLRAL

SEQ ID NO: 1850 - protein, 302 aa, Homo sapiens
MSASVWVGCISGTESAAKKAVTEKNFETKDFRASLENGVLLCDLINKLKPGVIKKINRLSTPIAGLDNINVFLKACEQIGLKEAQLFHPGDLQDLSNRVTVKQEETDRRVKNVLITLYWLGRKAQSNPYYNGPHLNLKAFENLLGQALTKALEDSSFLKRSGRDSGYGDIWCPERGEFLAPPRHHKREDSFESLDSLGSRSLTSCSSDITLRGGREGFESDTDSEFTFKMQDYNKDDMSYRRISAVEPKTALPFNRFLPNKSRQPSYVPAPLRKKKPDKHEDNRRSWASPVYTEADGTFSRY

SEQ ID NO: 1851 - protein, 85 aa, Homo sapiens
LFSFQLVFFYISFIGHFPISNSEVSPREQHKANNIKHNKNANKYFIFICKRIHQKEALLITPNVKSFVLIKNLIIISCQQMARKD

SEQ ID NO: 1852 - protein, 11 aa, Homo sapiens
VKWIVFWFIVT

SEQ ID NO: 1853 - protein, 1397 aa, Homo sapiens
VLAPAGLPGPSPPPGPEGRVIGRAAGRKGGREPPPPAPPPPLAPTPGRRARAARPEAPAMASPPRHGPPGPASGDGPNLNNNNNNNNHSVRKCGYLRKQKHGHKRFFVLRGPGAGGDEATAGGGSAPQPPRLEYYESEKKWRSKAGAPKRVIALDCCLNINKRADAKHKYLIALYTKDEYFAVAAENEQEQEGWYRALTDLVSEGRAAAGDAPPAAAPAASCSASLPGALGGSAGAAGAEDSYGLVAPATAAYREVWQVNLKPKGLGQSKNLTGVYRLCLSARTIGFVKLNCEQPSVTLQLMNIRRCGHSDSFFFIEVGRSAVTGPGELWMQADDSVVAQNIHETILEAMKALKELFEFRPRSKSQSSGSSATHPISVPGARRHHHLVNLPPSQTGLVRRSRTDSLAATPPAAKCSSCRVRTASEGDGGAAAGAAAAGARPVSVAGSPLSPGPVRAPLSRSHTLSGGCGGRGSKVALLPAGGALQHSRSMSMPVAHSPPAATSPGSLSSSSGHGSGSYPPPPGPHPPLPHPLHHGPGQRPSSGSASASGSPSDPGFMSLDEYGSSPGDLRAFCSHRSNTPESIAETPPARDGGGGGEFYGYMTMDRPLSHCGRSYRRVSGDAAQDLDRGLRKRTYSLTTPARQRPVPQPSSASLDEYTLMRATFSGSAGRLCPSCPASSPKVAYHPYPEDYGDIEIGSHRSSSSNLGADDGYMPMTPGAALAGSGSGSCRSDDYMPMSPASVSAPKQILQPRAAAAAAAAVPSAGPAGPAPTSAAGRTFPASGGGYKASSPAESSPEDSGYMRMWCGSKLSMEHADGKLLPNGDYLNVSPSDAVTTGTPPDFFSAALHPGGEPLRGVPGCCYSSLPRSYKAPYTCGGDSDQYVLMSSPVGRILEEERLEPQATPGPSQAASAFGAGPTQPPHPVVPSPVRPSGGRPEGFLGQRGRAVRPTRLSLEGLPSLPSMHEYPLPPEPKSPGEYINIDFGEPGARLSPPAPPLLASAASSSSLLSASSPASSLGSGTPGTSSDSRQRSPLSDYMNLDFSSPKSPKPGAPSGHPVGSLDGLLSPEASSPYPPLPPRPSASPSSSLQPPPPPPAPGELYRLPPASAVATAQGPGAASSLSSDTGDNGDYTEMAFGVAATPPQPIAAPPKPEAARVASPTSGVKRLSLMEQVSGVEAFLQASQPPDPHRGAKVIRADPQGGRRRHSSETFSSTTTVTPVSPSFAHNPKRHNSASVENVSLRKSSEGGVGVGPGGGDEPPTSPRQLQPAPPLAPQGRPWTPGQPGGLVGCPGSGGSPMRRETSAGFQNGLNYIAIDVREEPGLPPQPQPPPPPLPQPGDKSSWGRTRSLGGLISAVGVGSTGGGCGGPGPGALPPANTYASIDFLSHHLKEATIVKE

SEQ ID NO: 1854 - protein, 1126 aa, Homo sapiens
LGSMTVRRLSLLCRDLWALWLLLKAGADEIMHQDIVPLCAADIQDQLKKRFAYLSGGRGQDGSPVITFPDYPAFSEIPDKEFQNVMTYLTSIPSLQDAGIGFILVIDRRRDKWTSVKASVLRIAASFPANLQLVLVLRPTGFFQRTLSDIAFKFNRDDFKMKVPVIMLSSVPDLHGYIDKSQLTEDLGGTLDYCHSRWLCQRTAIESFALMVKQTAQMLQSFGTELAETELPNDVQSTSSVLCAHTEKKDKAKEDLRLALKEGHSVLESLRELQAEGSEPSVNQDQLDNQATVQRLLAQLNETEAAFDEFWAKHQQKLEQCLQLRHFEQGFREVKAILDAASQKIATFTDIGNSLAHVEHLLRDLASFEEKSGVAVERARALSLDGEQLIGNKHYAVDSIRPKCQELRHLCDQFSAEIARRRGLLSKSLELHRRLETSMKWCDEGIYLLASQPVDKCQSQDGAEAALQEIEKFLETGAENKIQELNAIYKEYESILNQDLMEHVRKVFQKQASMEEVFHRRQASLKKLAARQTRPVQPVAPRPEALAKSPCPSPGIRRGSENSSSEGGALRRGPYRRAKSEMSESRQGRGSAGEEEESLAILRRHVMSELLDTERAYVEELLCVLEGYAAEMDNPLMAHLLSTGLHNKKDVLFGNMEEIYHFHNRIFLRELENYTDCPELVGRCFLERMEDFQIYEKYCQNKPRSESLWRQCSDCPFFQECQRKLDHKLSLDSYLLKPVQRITKYQLLLKEMLKYSRNCEGAEDLQEALSSILGILKAVNDSMHLIAITGYDGNLGDLGKLLMQGSFSVWTDHKRGHTKVKELARFKPMQRHLFLHEKAVLFCKKREENGEGYEKAPSYSYKQSLNMAAVGITENVKGDAKKFEIWYNAREEVYIVQAPTPEIKAAWVNEIRKVLTSQLQACREASQHRALEQSQSLPLPAPTSTSPSRGNSRNIKKLEERKTDPLSLEGYVSSAPLTKPPEKGKGWSKTSHSLEAPEDDGGWSSAEEQINSSDAEEDGGLGPKKLVPGKYTVVADHEKGGPDALRVRSGDVVELVQEGDEGLWYVRDPTTGKEGWVPASSLSVRLGPSGSAQCLSSSESSPGSAVLSNSSSCSEGGQAPFSDLQG

SEQ ID NO: 1855 - protein, 305 aa, Homo sapiens
LGAEASFPPSALRGGSALAAAARWGPAEEGARIPGSFFAWAAPAAPGAGAAAAPAPRADPGGRGLLGEAGRGPNYAEAGTPTLHTSPRPHLRPCTHTHTRTPTPPRCKAGFKRTSLRFLPAPHHRTREEEAGEKQNFFPLSCPFLRTCSEAEEPVLEEMVMGLGVLLLVFVLGLGLTPPTLAQDNSRYTHFLTQHYDAKPQGRDDRYCESIMRRRGLTSPCKDINTFIHGNKRSIKAICENKNGNPHRENLRISKSSFQVTTCKLHGGSPWPPCQYRATAGFRNVVVACENGLPVHLDQSIFRRP

SEQ ID NO: 1856 - protein, 22 aa, Homo sapiens
MMVMMMMIMTLMIFNRIKIEFF

SEQ ID NO: 1857 - protein, 218 aa, Homo sapiens
LLLPVQASLAMGEVEISALAYVKMCLHAARYPHAAVNGLFLAPAPRSGECLCLTDCVPLFHSHLALSVMLEVALNQVDVWGAQAGLVVAGYYHANAAVNDQSPGPLALKIAGRIAEFFPDAVLIMLDNQKLVPQPRVPPVIVLENQGLRWVPKDKNLVMWRDWEESRQMVGALLEDRAHQHLVDFDCHLDDIRQDWTNQRLNTQITQWVGPTNGNGNA

SEQ ID NO: 1858 - protein, 37 aa, Homo sapiens
MQSGPPPGLGRGRTPGPRAPGAGGLPASRVSVVAEPK

SEQ ID NO: 1859 - protein, 754 aa, Homo sapiens
LPALCDLLASAADPQIRQFAAVLTRRRLNTRWRRLAAEQRESLKSLILTALQRETEHCVSLSLAQLSATIFRKEGLEAWPQLLQLLQHSTHSPHSPEREMGLLLLSVVVTSRPEAFQPHHRELLRLLNETLGEVGSPGLLFYSLRTLTTMAPYLSTEDVPLARMLVPKLIMAMQTLIPIDEAKACEALEALDELLESEVPVITPYLSEVLTFCLEVARNVALGNAIRIRILCCLTFLVKVKSKALLKNRLLPPLLHTLFPIVAAEPPPGQLDPEDQDSEEEELEIELMGETPKHFAVQVVDMLALHLPPEKLCPQLMPMLEEALRSESPYQRKAGLLVLAVLSDGAGDHIRQRLLPPLLQIVCKGLEDPSQVVRNAALFALGQFSENLQPHISSYSREVMPLLLAYLKSVPLGHTHHLAKACYALENFVENLGPKVQPYLPELMECMLQLLRNPSSPRAKELAVSALGAIATAAQASLLPYFPAIMEHLREFLLTGREDLQPVQIQSLETLGVLARAVGEPMRPLAEECCQLGLGLCDQVDDPDLRRCTYSLFAALSGLMGEGLAPHLEQITTLMLLSLRSTEGIVPQYDGSSSFLLFDDESDGEEEEELMDEDVEEEDDSEISGYSVENAFFDEKEDTCAAVGEISVNTSVAFLPYMESVFEEVFKLLECPHLNVRKAAHEALGQFCCALHKACQSCPSEPNTAGCPGPSRAILHAGSEQGAGTPGGDGRAGGPDRGAPQLWDPHTEAPWAPR

SEQ ID NO: 1860 - protein, 262 aa, Homo sapiens
LGSLSGKMQPLLLLLAFLLPTGAEAGEIIGGRESRPHSRPYMAYLQIQSPAGQSRCGGFLVREDFVLTAAHCWGSNINVTLGAHNIQRRENTQQHITARRAIRHPQYNQRTIQNDIMLLQLSRRVRRNRNVNPVALPRAQEGLRPGTLCTVAGWGRVSMRRGTDTLREVQLRVQRDRQCLRIFGSYDPRRQICVGDRRERKAAFKGDSGGPLLCNNVAHGIVSYGKSSGVPPEVFTRVSSFLPWIRTTMRSFKLLDQMETPL

SEQ ID NO: 1861 - protein, 75 aa, Homo sapiens
LGSLSGKMQPLLLLLAFLLPTGAEAGEIIGGRESRPHSRPYMAYLQIQSPAGQSRCGGFLVREDFVLTAAHCWGR

SEQ ID NO: 1862 - protein, 253 aa, Homo sapiens
LGSLPEKMQPFLLLLAFLLTPGAGTEEIIGGHEAKPHSRPYMAFVQFLQEKSRKRCGGILVRKDFVLTAAHCQGSSINVTLGAHNIKEQERTQQFIPVKRPIPHPAYNPKNFSNDIMLLQLERKAKWTTAVRPLRLPSSKAQVKPGQLCSVAGWGYVSMSTLATTLQEVLLTVQKDCQCERLFHGNYSRATEICVGDPKKTQTGFKGDSGGPLVCKDVAQGILSYGNKKGTPPGVYIKVSHFLPWIKRTMKRL

SEQ ID NO: 1863 - protein, 21 aa, Homo sapiens
MQPILLLLAFLLLPRADAGMF

SEQ ID NO: 1864 - protein, 60 aa, Homo sapiens
MKRNCERRRFPQAGTNELLGHVVRTRQRHTIKENAGLSWPLKSGLPRLPPSIKMVVGRPS

SEQ ID NO: 1865 - protein, 271 aa, Homo sapiens
VGHGGPPRRAEEGAATGRPPRQRPGLHERRGVRADGQGAAGDPPRAAGGAARLGALEAAAHRGRGLTPLHLAVITNQPEIAEALLGAGCDPELRDFRGNTPLHLACEQGCLASVGVLTQSCTTPHLHSILKATNYNGHTCLHLASIHGYLGIVELLVSLGADVNAQEPCNGRTALHLAVDLQNPDLVSLLLKCGADVNRVTYQGYSPYQLTWGRPSTRIQQQLGQLTLENLQMLPESEDEESYDTESEFTEFTEDELPYDDCVFGGQRLTL

SEQ ID NO: 1866 - protein, 15 aa, Homo sapiens
MAAPGGGKEEVSKPA

SEQ ID NO: 1867 - protein, 88 aa, Homo sapiens
LKPGTRVALDMTTLTIMRYLPREVDPLVYNMSHEDPGNVSYSEIGGLSEQIRELREVIELPLTNPELFQRVGIIPPKGCLLYGPPGWY

SEQ ID NO: 1868 - protein, 79 aa, Homo sapiens
LSRVNCSQFLGLCALPVAACLLLYLSDTISPEQAIDSLRDLRGSGAIQTIKQYNYLHEFRDKLAAHLSSRDSQSRSVSR

SEQ ID NO: 1869 - protein, 39 aa, Homo sapiens
VCVWGGLGLLLSVTSPSPSPLPLPAAAAVAAPWAVGNER

SEQ ID NO: 1870 - protein, 47 aa, Homo sapiens
MHNRQVPYFVSRCLFFSGLSLKCQITREKAVTVYRSNLVPCNLTLSL

SEQ ID NO: 1871 - protein, 39 aa, Homo sapiens
MAQVDSGLELSWGSLFAAAAAAATAVLGARSPGKKPSHV

SEQ ID NO: 1872 - protein, 389 aa, Homo sapiens
VRGRSPPPFSAGSARGPGRGGSGGGGGGTARPSSDPRSASPPPGGGAHSLAARAGRQTRPVGDFLRTQAPRPRRKMQTFLKGKRVGYWLSEKKIKKLNFQAFAELCRKRGMEVVQLNLSRPIEEQGPLDVIIHKLTDVILEADQNDSQSLELVHRFQEYIDAHPETIVLDPLPAIRTLLDRSKSYELIRKIEAYMEDDRICSPPFMELTSLCGDDTMRLLEKNGLTFPFICKTRVAHGTNSHEMAIVFNQEGLNAIQPPCVVQNFINHNAVLYKVFVVGESYTVVQRPSLKNFSAGTSDRESIFFNSHNVSKPESSSVLTELDKIEGVFERPSDEVIRELSRALRQALGVSLFGIDIIINNQTGQHAVIDINAFPGDCQVCFIEGWKTD

SEQ ID NO: 1873 - protein, 296 aa, Homo sapiens
LLGHSGGLTFGLRSGRVYSPPPPRPRGPRHRTSGGARPRLPRHSRTGSLLAGAGPGLAALVTMSETSFNLISEKCDILSILRDHPENRIYRRKIEELSKRFTAIRKTKGDGNCFYRALGYSYLESLLGKSREIFKFKERVLQTPNDLLAAGFEEHKFRNFFNAFYSVVELVEKDGSVSSLLKVFNDQSASDHIVQFLRLLTSAFIRNRADFFRHFIDEEMDIKDFCTHEVEPMATECDHIQITALSQALSIALQVEYVDEMDTALNHHVFPEAATPSVYLLYKTSHYNILYAADKH

SEQ ID NO: 1874 - protein, 124 aa, Homo sapiens
LRSGRVYSPPPPRPRGPRHRTSGGARPRLPRHSRTGSLLAGAGPGLAALVTMSETSFNLISEKCDILSILRDHPENRIYRRKIEELSKRFTAIRKTKGDGNCFYRALGYSYLESLLGKSREIFK

SEQ ID NO: 1875 - protein, 10 aa, Homo sapiens
MAAVGKERRR

SEQ ID NO: 1876 - protein, 233 aa, Homo sapiens
MLVSLKMSYKAAAGEDYKADCPPGNPAPTSNHGPDATEAEEDFVDPWTVQTSSAKGIDYDKLIVRFGSSKIDKELINRIERATGQRPHHFLRRGIFFSHRDMNQVLDAYENKKPFYLYTGRGPSSEAMHVGHLIPFIFTKWLQDVFNVPLVIQMTDDEKYLWKDLTLDQAYSYAVENAKDIIACGFDINKTFIFSDLDYMGNLKYGLSHSMMASQIFILSCARKSCLAVSCQG

SEQ ID NO: 1877 - protein, 309 aa, Homo sapiens
VWSPGSRSVAGPWPLPDISTMSFVAYEELIKEGDTAILSLGHGAMVAVRVQRGAQTQTRHGVLRHSVDLIGRPFGSKVTCGRGGWVYVLHPTPELWTLNLPHRTQILYSTDIALITMMLELRPGSVVCESGTGSGSVSHAIIRTIAPTGHLHTVEFHQQRAEKAREEFQEHRVGRWVTVRTQDVCRSGFGVSHVADAVFLDIPSPWEAVGHAWDALKVEGGRFCSFSPCIEQVQRTCQALAARGFSELSTLEVLPQVYNVRTVSLPPPDLGTGTDGPAGSDTSPFRSGTPMKEAVGHTGYLTFATKTPG

SEQ ID NO: 1878 - protein, 116 aa, Homo sapiens
LLIKTSRAQTLQLWEKSPSPRIPRSFHSVISTEHRGLTMEFGLSWVFLVAIIKGVQCQVQLVESGGGLVKPGGSLRLSCAASGFTFSDYYMSWIRQAPGKGLEWVSYISSSTTQTL

SEQ ID NO: 1879 - protein, 47 aa, Homo sapiens
LVISTEHRGLTMELGLCWVFLVAILEGVQCEVQLVESGGGLVQPGGP

SEQ ID NO: 1880 - protein, 728 aa, Homo sapiens
MAHRKLESVGSGMLDHRVRPGPVPHSQEPESEDMELPLEGYVPEGLELAALRPESPAPEEQECHNHSPDGDSSSDYVNNTSEEEDYDEGLPEEEEGITYYIRYCPEDDSYLEGMDCNGEEYLAHSAHPVDTDECQEAVEEWTDSAGPHPHGHEAEGSQDYPDGQLPIPEDEPSVLEAHDQEEDGHYCASKEGYQDYYPEEANGNTGASPYRLRRGDGDLEDQEEDIDQIVAEIKMSLSMTSITSASEASPEHGPEPGPEDSVEACPPIKASCSPSRHEARPKSLNLLPEAKHPGDPQRGFKPKTRTPEERLKWPHEQVCNGLEQPRKQQRSDLNGPVDNNNIPETKKVASFPSFVAVPGPCEPEDLIDGIIFAANYLGSTQLLSERNPSKNIRMMQAQEAVSRVKNSEGDAQTLTEVDLFISTQRIKVLNADTQETMMDHALRTISYIADIGNIVVLMARRRMPRSASQDCIETTPGAQEGKKQYKMICHVFESEDAQLIAQSIGQAFSVAYQEFLRANGINPEDLSQKEYSDIINTQEMYNDDLIHFSNSENCKELQLEKHKGEILGVVVVESGWGSILPTVILANMMNGGPAARSGKLSIGDQIMSINGTSLVGLPLATCQGIIKGLKNQTQVKLNIVSCPPVTTVLIKRPDLKYQLGFSVQNGIVSSPSCSGPPPPLQGPGRGSSSRPMGQAMSGSLVGPGLWLQLPTARPPGAGTFHGSLGGPG

SEQ ID NO: 1881 - protein, 224 aa, Homo sapiens
LLILLLLLLTTLRVKLCDRPRSENVIKKKGGSRRAQGRGEMEPSQCVEELEDDVFQPEDGEPVTQPGSLLSADLFAQSLLDCPLSRLQLFPLTHCCGPGLRPTSQEDKATQTLSPASPSQGVMLPCGVTEEPQRLFYGNAGYRLPLPASFPAVLPIGEQPPEGQWQHQAEVQIARKLQCIADQFHRLHVQQHQQNQNRVWWQILLFLHNLALNGEENRNGAGPR

SEQ ID NO: 1882 - protein, 175 aa, Homo sapiens
MTGFLLPPASRASRTGAERRCGPGPAPPPPRAEAVSVAGSRREVGLMRRRGEIDMATEGDVELELETETSGPERPPEKPRKHDSGAADLERVTDYAEEKEIQSSNLETAMSVIGDRRSREQKAKQEREKELAKVTIKKEDLELIMTEMEISRAAAERSLREHMGNVVEALIALTN

SEQ ID NO: 1883 - protein, 236 aa, Homo sapiens
LTWFTTIVPLVLVITMTAVKDATDDYFRHKSDNQVNNRQSEVLINSKLQNEKWMNVKVGDIIKLENNQFVAADLLLLSSSEPHGLCYVETAELDGETNLKVRHALSVTSELGADISRLAGFDGIVVCEVPNNKLDKFMGILSWKDSKHSLNNEKIILRGCILRNTSWCFGMVIFAGPDTKLMQNSGKTKFKRTSIDRLMNTLVLWEIQSGRVKLGTNSELSSFGMKERRALCSPDS

SEQ ID NO: 1884 - protein, 66 aa, Homo sapiens
VSHRSWPEISSLLCLLSVIQLQKKLPRKPGPRVKRRNGHKSPVFLHSVGFMHLYPIKCPWTKPETR

SEQ ID NO: 1885 - protein, 512 aa, Homo sapiens
LRQASSHTVNPTPEPRTGLSPTPGPQESWQSADPQSGKRLRAGIQTPRERSAVPGPQPKEETRLTEGDENKSPLLRSSAAPTSRPNACARPLISVYSEKGESSGKNVTLPAVFKAPIRPDIVNFVHTNLRKNNRQPYAVSELAGHQTSAESWGTGRAVARIPRVRGGGTHRSGQGAFGNMCRGGRMFAPTKTWRRWHRRVNTTQKRYAICSALAASALPALVMSKGHRIEEVPELPLVVEDKVEGYKKTKEAVLLLKKLKAWNDIKKVYASQRMRAGKGKMRNRRRIQRRGPCIIYNEDNGIIKAFRNIPGITLLNVSKLNILKLAPGGHVGRFCIWTESAFRKLDELYGTWRKAASLKSNYNLPMHKMINTDLSRILKSPEIQRALRAPRKKIHRRVLKKNPLKNLRIMLKLNPYAKTMRRNTILRQARNHKLRVDKAAAAAAALQAKSDEKAAVAGKKPVVGKKGKKAAVGVKKQKKPLVGKKAAATKKPAPEKKPAEKKPTTEEKKPAA

SEQ ID NO: 1886 - protein, 153 aa, Homo sapiens
LRGAWLSPLSAMACARPLISVYSEKGESSGKNVTLPAVFKAPIRPDIVNFVHTNLRKNNRQPYAVSELAGHQTSAESWGTGRAVARIPRVRGGGTHRSGQGAFGNMCRGGRMFAPTKTWRRWHRRVNTTQKRYAICSALAASALPALVMSKGL

SEQ ID NO: 1887 - protein, 74 aa, Homo sapiens
VRPSLHPATSTASGSASPTLARAMASVSELACIYSALILHDDEVTVTEDKINALIKAAGVNVEPFWPGLFAKVR

SEQ ID NO: 1888 - protein, 523 aa, Homo sapiens
LSQKGSIMSPEAQPQRTKGPQQPCRSPIVKPGLPSFRPSSCTQPWLTHSWSTCAAWTLIHHPSQPGTLASSVPLYHAETIKNVRTATESFASDPILYRPVAVALDTKGPEIRTGLIKGSGTAEVELKKGATLKITLDNAYMEKCDENILWLDYKNICKVVEVGSKIYVDDGLISLQVKQKGADFLVTEVENGGSLGSKKGVNLPGAAVDLPAVSEKDIQDLKFGVEQDVDMVFASFIRKASDVHEVRKVLGEKGKNIKIISKIENHEGVRRFDEILEASDGIMVARGDLGIEIPAEKVFLAQKMMIGRCNRAGKPVICATQMLESMIKKPRPTRAEGSDVANAVLDGADCIMLSGETAKGDYPLEAVRMQHLIAREAEAAIYHLQLFEELRRLAPITSDPTEATAVGAVEASFKCCSGAIIVLTKSGRSAHQVARYRPRAPIIAVTRNPQTARQAHLYRGIFPVLCKDPVQEAWAEDVDLRVNFAMNVGKARGFFKKGDVVIVLTGWRPGSGFTNTMRVVPVP

SEQ ID NO: 1889 - protein, 487 aa, Homo sapiens
LHSSCTRRGSGSLRLCSVARVGQRRRTSAAMSKPHSEAGTAFIQTQQLHAAMADTFLEHMCRLDIDSPPITARNTGIICTIGPASRSVELKKGATLKITLDNAYMEKCDENILWLDYKNICKVVEVGSKIYVDDGLISLQVKQKGADFLVTEVENGGSLGSKKGVNLPGAAVDLPAVSEKDIQDLKFGVEQDVDMVFASFIRKASDVHEVRKVLGEKGKNIKIISKIENHEGVRRFDEILEASDGIMVARGDLGIEIPAEKVFLAQKMMIGRCNRAGKPVICATQMLESMIKKPRPTRAEGSDVANAVLDGADCIMLSGETAKGDYPLEAVRMQHLIAREAEAAIYHLQLFEELRRLAPITSDPTEATAVGAVEASFKCCSGAIIVLTKSGRSAHQVARYRPRAPIIAVTRNPQTARQAHLYRGIFPVLCKDPVQEAWAEDVDLRVNFAMNVGKARGFFKKGDVVIVLTGWRPGSGFTNTMRVVPVP

SEQ ID NO: 1890 - protein, 561 aa, Homo sapiens
LHSSCTRRGSGSLRLCSVARVGQRRRTSAAMSKPHSEAGTAFIQTQQLHAAMADTFLEHMCRLDIDSPPITARNTGIICTIGPASRSVETLKEMIKSGMNVARLNFSHGTHEYHAETIKNVRTATESFASDPILYRPVAVALDTKGPEIRTGLIKGSGTAEVELKKGATLKITLDNAYMEKCDENILWLDYKNICKVVEVGSKIYVDDGLISLQVKQKGADFLVTEVENGGSLGSKKGVNLPGAAVDLPAVSEKDIQDLKFGVEQDVDMVFASFIRKASDVHEVRKVLGEKGKNIKIISKIENHEGVRRFDEILEASDGIMVARGDLGIEIPAEKVFLAQKMMIGRCNRAGKPVICATQMLESMIKKPRPTRAEGSDVANAVLDGADCIMLSGETAKGDYPLEAVRMQHLIAREAEAAIYHLQLFEELRRLAPITSDPTEATAVGAVEASFKCCSGAIIVLTKSGRSAHQVARYRPRAPIIAVTRNPQTARQAHLYRGIFPVLCKDPVQEAWAEDVDLRVNFAMNVGKARGFFKKGDVVIVLTGWRPGSGFTNTMRVVPVP

SEQ ID NO: 1891 - protein, 311 aa, Homo sapiens
LHSSCTRRGSGSLRLCSVARVGQRRRTSAAMSKPHSEAGTAFIQTQQLHAAMADTFLEHMCRLDIDSPPITARNTGIICTIGPASRSVETLKEMIKSGMNVARLNFSHGTHEYHAETIKNVRTATESFASDPILYRPVAVALDTKGPEIRTGLIKGSGTAEVELKKGATLKITLDNAYMEKCDENILWLDYKNICKVVEVGSKIYVDDGLISLQVKQKGADFLVTEVENGGSLGSKKGVNLPGAAVDLPAVSEKDIQDLKFGVEQDVDMVFASFIRKASDVHEVRKVLGEKGKNIKIISKIENHEGVRRQV

SEQ ID NO: 1892 - protein, 170 aa, Homo sapiens [sequence omitted]

SEQ ID NO: 1893 - protein, 630 aa, Homo sapiens
VRARSSAGPGLSPRCPRVERVGLGHVGQDRVDFGQTEPHTVLFHEPGSSSVWVGGRGKVYLFDFPEGKNASVRTVNIGSTKGSCLDKRDCENYITLLERRSEGLLACGTNARHPSCWNLVNGTVVPLGEMRGYAPFSPDENSLVLFEGDEVYSTIRKQEYNGKIPRFRRIRGESELYTSDTVMQNPQFIKATIVHQDQAYDDKIYYFFREDNPDKNPEAPLNVSRVAQLCRGDQGGESSLSVSKWNTFLKAMLVCSDAATNKNFNRLQDVFLLPDPSGQWRDTRVYGVFSNPWNYSAVCVYSLGDIDKVFRTSSLKGYHSSLPNPRPGKCLPDQQPIPTETFQVADRHPEVAQRVEPMGPLKTPLFHSKYHYQKVAVHRMQASHGETFHVLYLTTDRGTIHKVVEPGEQEHSFAFNIMEIQPFRRAAAIQTMSLDAERRKLYVSSQWEVSQVPLDLCEVYGGGCHGCLMSRDPYCGWDQGRCISIYSSERSVLQSINPAEPHKECPNPKPDKAPLQKVSLAPNSRYYLSCPMESRHATYSWRHKENVEQSCEPGHQSPNCILFIENLTAQQYGHYFCEAQEGSYFREAQHWQLLPEDGIMAEHLLGHACALAASLWLGVLPTLTLGLLVH

SEQ ID NO: 1894 - protein, 790 aa, Homo sapiens
VLDSSAPLERGPPRLLRQSFYGVRGVELRPREGIGPAAPGRRPQVWLVRSWAFPVELPGRGWRRFPQQFRSRSGKPVRREKAARGGGRGGVGSALAPPPGAWVCLRPGAGSVSADCRCRSRGHGMTPPPPGRAAPSAPRARVPGPPARLGLPLRLRLLLLLWAAAASAQGHLRSGPRIFAVWKGHVGQDRVDFGQTEPHTVLFHEPGSSSVWVGGRGKVYLFDFPEGKNASVRTVNIGSTKGSCLDKRDCENYITLLERRSEGLLACGTNARHPSCWNLVNGTVVPLGEMRGYAPFSPDENSLVLFEGDEVYSTIRKQEYNGKIPRFRRIRGESELYTSDTVMQNPQFIKATIVHQDQAYDDKIYYFFREDNPDKNPEAPLNVSRVAQLCRGDQGGESSLSVSKWNTFLKAMLVCSDAATNKNFNRLQDVFLLPDPSGQWRDTRVYGVFSNPWNYSAVCVYSLGDIDKVFRTSSLKGYHSSLPNPRPGKCLPDQQPIPTETFQVADRHPEVAQRVEPMGPLKTPLFHSKYHYQKVAVHRMQASHGETFHVLYLTTDRGTIHKVVEPGEQEHSFAFNIMEIQPFRRAAAIQTMSLDAERRKLYVSSQWEVSQVPLDLCEVYGGGCHGCLMSRDPYCGWDQGRCISIYSSERSVLQSINPAEPHKECPNPKPDKAPLQKVSLAPNSRYYLSCPMESRHATYSWRHKENVEQSCEPGHQSPNCILFIENLTAQQYGHYFCEAQEGSYFREAQHWQLLPEDGIMAEHLLGHACALAASLWLGVLPTLTLGLLVH

SEQ ID NO: 1895 - protein, 44 aa, Homo sapiens
MSRDPYCGWDQGRCISIYSSERSVLQSINPAEPHKECPNPKPGT

SEQ ID NO: 1896 - protein, 28 aa, Homo sapiens
LDTRARPPITELHSFLILLLILAPNKTG

SEQ ID NO: 1897 - protein, 48 aa, Homo sapiens
MWATLPLLCAGAWLLGVPVCGAAELCVNSLEKFHFKSWMSKENKKVSL

SEQ ID NO: 1898 - protein, 36 aa, Homo sapiens
LLPPHPDGGKHRWASQWLLPRPRPSRTPPSKRLFLK

SEQ ID NO: 1899 - protein, 415 aa, Homo sapiens
VPIPAPASPQHAAPPPAGRAVRRAALRPQPPRRPGVMWPFPEGGNTIPILHTDICSKNPCHNGGLCEEISQEVRGDVFPSYTCTCLKGYAGNHCETKCVEPLGLENGNIANSQIAASSVRVTFLGLQHWVPELARLNRAGMVNAWTPSSNDDNPWIQVNLLRRMWVTGVVTQGASRLASHEYLKAFKVAYSLNGHEFDFIHDVNKKHKEFVGNWNKNAVHVNLFETPVEAQYVRLYPTSCHTACTLRFELLGCELNGCANPLGLKNNSIPDKQITASSSYKTWGLHLFSWNPSYARLDKQGNFNAWVAGSYGNDQWLQVDLGSSKEVTGIITQGARNFGSVQFVASYKVAYSNDSANWTEYQDPRTGSSKIFPGNWDNHSHKKNLFETPILARYVRILPVAWHNRIALRLELLGC

SEQ ID NO: 1900 - protein, 350 aa, Homo sapiens
LSSPACPFQRPRPRSMPRPRLLAALCGALLCAPSLLVALDICSKNPCHNGGLCEEISQEVRGDVFPSYTCTCLKGYAGNHCETKCVEPLGLENGNIANSQIAASSVRVTFLGLQHWVPELARLNRAGMVNAWTPSSNDDNPWIQVNLLRRMWVTGVVTQGASRLASHEYLKAFKVAYSLNGHEFDFIHDVNKKHKEFVGNWNKNAVHVNLFETPVEAQYVRLYPTSCHTACTLRFELLGCELNGCANPLGLKNNSIPDKQITASSSYKTWGLHLFSWNPSYARLDKQGNFNAWVAGSYGNDQWLQIFPGNWDNHSHKKNLFETPILARYVRILPVAWHNRIALRLELLGC

SEQ ID NO: 1901 - protein, 402 aa, Homo sapiens
LSSPACPFQRPRPRSMPRPRLLAALCGALLCAPSLLVALDICSKNPCHNGGLCEEISQEVRGDVFPSYTCTCLKGYAGNHCETKCVEPLGLENGNIANSQIAASSVRVTFLGLQHWVPELARLNRAGMVNAWTPSSNDDNPWIQVNLLRRMWVTGVVTQGASRLASHEYLKAFKVAYSLNGHEFDFIHDVNKKHKEFVGNWNKNAVHVNLFETPVEAQYVRLYPTSCHTACTLRFELLGCELNGCANPLGLKNNSIPDKQITASSSYKTWGLHLFSWNPSYARLDKQGNFNAWVAGSYGNDQWLQVDLGSSKEVTGIITQGARNFGSVQFVASYKVAYSNDSANWTEYQDPRTGSSKIFPGNWDNHSHKKNLFETPILARYVRILPVAWHNRIALRLELLGC

SEQ ID NO: 1902 - protein, 1939 aa, Homo sapiens
VSGAVSLKEGTKGRWRGPGPGPRGGGTADMACCHKVMLLLDTAGGAARHSRVRRAALRLLTYLSCRFGLARVHWAFKFFDSQGARSRPSRVSDFRELGSRSWEDFEEELEARLEDRAHLPGPAPRATHTHGALMETLLDYQWDRPEITSPTKPILRSSGRRLLDVESEAKEAEAALGGLVNAVFLLAPCPHSQRELLQFVSGCEAQAQRLPPTPKQVMEKLLPKRVREVMVARKITFYWVDTTEWSKLWESPDHLGYWTVCELLHHGGGTVLPSESFSWDFAQAGEMLLRSGIKLSSEPHLSPWISMLPTDATLNRLLYNSPEYEASFPRMEGMLFLPVEAGKEIQETWTVTLEPLAMHQRHFQKPVRIFLKGSVAQWSLPTSSTLGTDSWMLGSPEESTATQRLLFQQLVSRLTAEELHLVADVDPGEGRPPITGVISPLSASAMILTVCRTKEAEFQRHVLQTAVADSPRDTASLFSDVVDSILNQTHDSLADTASAASPVPEWAQQELGHTTPWSPAVVEKWFPFCNISGASSDLMESFGLLQAASANKEESSKTEGELIHCLAELYQRKSREESTIAHQEDSKKKRGVPRTPVRQKMNTMCRSLKMLNVARLNVKAQKLHPDGSPDVAGEKGIQKIPSGRTVDKLEDRGRTLRSSKPKDFKTEEELLSYIRENYQKTVATGEIMLYACARNMISTVKMFLKSKGTKELEVNCLNQVKSSLLKTSKSLRQNLGKKLDKEDKVRECQLQVFLRLEMCLQCPSINESTDDMEQVVEEVTDLLRMVCLTEDSAYLAEFLEEILRLYIDSIPKTLGNLYNSLGFVIPQKLAGVLPTDFFSDDSMTQENKSPLLSVPFLSSARRSVSGSPESDELQELRTRSAKKRRKNALIRHKSIAEVSQNLRQIEIPKVSKRATKKENSHPAPQQPSQPVKDTVQEVTKVRRNLFNQELLSPSKRSLKRGLPRSHSVSAVDGLEDKLDNFKKNKGYHKLLTKSVAETPVHKQISKRLLHRQIKGRSSDPGPDIGVVEESPEKGDEISLRRSPRIKQLSFSRTHSASFYSVSQPKSRSVQRVHSFQQDKSDQRENSPVQSIRSPKSLLFGAMSEMISPSEKGSARMKKRSRNTLDSEVPAAYQTPKKSHQKSLSFSKTTPRRISHTPQTPLYTPERLQKSPAKMTPTKQAAFKESLKDSSSPGHDSPLDSKITPQKRHTQAGEGTSLETKTPRTPKRQGTQPPGFLPNCTWPHSVNSSPESPSCPAPPTSSTAQPRRECLTPIRDPLRTPPRAAAFMGTPQNQTHQQPHVLRAARAEEPAQKLKDKAIKTPKRPGNSTVTSSPPVTPKKLFTSPLCDVSKKSPFRKSKIECPSPGELDQKEPQMSPSVAASLSCPVPSTPPELSQRATLDTVPPPPPSKVGKRCRKTSDPRRSIVECQPDASATPGVGTADSPAAPTDSRDDQKGLSLSPQSPPERRGYPGPGLRSDWHASSPLLITSDTEHVTLLSEAEHHGIGDLKSNVLSVEEGEGLRTADAEKSSLSHPGIPPSPPSCGPGSPLMPSRDVHCTTDGRQCQASAQLDNLPASAWHSTDSASPQTYEVELEMQASGLPKLRIKKIDPSSSLEAEPLSKEESSLGEESFLPALSMPRASRSLSKPEPTYVSPPCPRLSHSTPGKSRGQTYICQACTPTHGPSSTPSPFQTDGVPWTPSPKHSGKTTPDIIKDWPRRKRAVGCGAGSSSGRGEVGADLPGSLSLLESEGKDHGLELSIHRTPILEDFELEGVCQLPDQSPPRNSMPKAEEASSWGQFGLSSRKRVLLAKEEADRGAKRICDLREDSEVSKSKEGSPSWSAWQLPSTGDEEVFVSGSTPPPSCAVRSCLSASALQALTQSPLLFQGKTPSSQSKDPRDEDVDVLPSTVEDSPFSRAFSRRRPISRTYTRKKLMGTWLEDL

SEQ ID NO: 1903 - protein, 490 aa, Homo sapiens
VPARPAPARPSVSPRPGSREERRALGPLPPCSFALQLGMAGYLRVVRSLCRASGSRPAWAPAALTAPTSQEQPRRHYADKRIKVAKPVVEMDGDEMTRIIWQFIKEKLILPHVDIQLKYFDLGLPNRDQTDDQVTIDSALATQKYSVAVKCATITPDEARVEEFKLKKMWKSPNGTIRNILGGTVFREPIICKNIPRLVPGWTKPITIGRHAHGDQYKATDFVADRAGTFKMVFTPKDGSGVKEWEVYNFPAGGVGMGMYNTDESISGFAHSCFQYAIQKKWPLYMSTKNTILKAYDGRFKDIFQEIFDKHYKTDFDKNKIWYEHRLIDDMVAQVLKSSGGFVWACKNYDGDVQSDILAQGFGSLGLMTSVLVCPDGKTIEAEAAHGTVTRHYREHQKGRPTSTNPIASIFAWTRGLEHRGKLDGNQDLIRFAQMLEKVCVETVESGAMTKDLAGCIHGLSNVKLNEHFLNTTDFLDTIKSNLDRALGRQ

SEQ ID NO: 1904 - protein, 642 aa, Homo sapiens
LLLSGPCGVGLDLDSRLLGASAMRRSEVLAEESIVCLQKALNHLREIWELIGIPEDQRLQRTEVVKKHIKELLDMMIAEEESLKERLIKSISVCQKELNTLCSELHVEPFQEEGETTILQLEKDLRTQVELMRKQKKERKQELKLLQEQDQELCEILCMPHYDIDSASVPSLEELNQFRQHVTTLRETKASRREEFVSIKRQIILCMEALDHTPDTSFERDVVCEDEDAFCLSLENIATLQKLLRQLEMQKSQNEAVCEGLRTQIRELWDRLQIPEEEREAVATIMSGSKAKVRKALQLEVDRLEELKMQNMKKVIEAIRVELVQYWDQCFYSQEQRQAFAPFCAEDYTESLLQLHDAEIVRLKNYYEVHKELFEGVQKWEETWRLFLEFERKASDPNRFTNRGGNLLKEEKQRAKLQKMLPKLEEELKARIELWEQEHSKAFMVNGQKFMEYVAEQWEMHRLEKERAKQERQLKNKKQTETEMLYGSAPRTPSKRRGLAPNTPGKARKLNTTTMSNATANSSIRPIFGGTVYHSPVSRLPPSGSKPVAASTCSGKKTPRTGRHGANKENLELNGSILSGGYPGSAPLQRNFSINSVASTYSEFAKDPSLSDSSTVGLQRELSKASKSDATSGILNSTNIQS

SEQ ID NO: 1905 - protein, 691 aa, Homo sapiens
LLASPHPDCAPATSARGAGIFLERRDATPIATRLRPVARFEILRGSTARGAATRSDIAGVCGWLLLSGPCGVGLDLDSRLLGASAMRRSEVLAEESIVCLQKALNHLREIWELIGIPEDQRLQRTEVVKKHIKELLDMMIAEEESLKERLIKSISVCQKELNTLCSELHVEPFQEEGETTILQLEKDLRTQVELMRKQKKERKQELKLLQEQDQELCEILCMPHYDIDSASVPSLEELNQFRQHVTTLRETKASRREEFVSIKRQIILCMEALDHTPDTSFERDVVCEDEDAFCLSLENIATLQKLLRQLEMQKSQNEAVCEGLRTQIRELWDRLQIPEEEREAVATIMSGSKAKVRKALQLEVDRLEELKMQNMKKVIEAIRVELVQYWDQCFYSQEQRQAFAPFCAEDYTESLLQLHDAEIVRLKNYYEVHKELFEGVQKWEETWRLFLEFERKASDPNRFTNRGGNLLKEEKQRAKLQKMLPKLEEELKARIELWEQEHSKAFMVNGQKFMEYVAEQWEMHRLEKERAKQERQLKNKKQTETEMLYGSAPRTPSKRRGLAPNTPGKARKLNTTTMSNATANSSIRPIFGGTVYHSPVSRLPPSGSKPVAASTCSGKKTPRTGRHGANKENLELNGSILSGGYPGSAPLQRNFSINSVASTYSEFARELSKASKSDATSGILNSTNIQS

SEQ ID NO: 1906 - protein, 205 aa, Homo sapiens
LLLSGPCGVGLDLDSRLLGASAMRRSEVLAEESIVCLQKALNHLREIWELIGIPEDQRLQRTEVVKKHIKELLDMMIAEEESLKERLIKSISVCQKELNTLCSELHVEPFQEEGETTILQLEKDLRTQVELMRKQKKERKQELKLLQEQDQELCEILCMPHYDIDSASVPSLEELNQFRQHVTTLRETKVHCLHLFFLKVTLVFL

SEQ ID NO: 1907 - protein, 147 aa, Homo sapiens
VARFEILRGSTARGAATRSDIAGVCGWLLLSGPCGVGLDLDSRLLGASAMRRSEVLAEESIVCLQKALNHLREIWELIGIPEDQRLQRTEVVKKHIKELLDMMIAEEESLKERLIKSISVCQKELNTLCSELHVEPFQVRGSPQGLW

SEQ ID NO: 1908 - protein, 31 aa, Homo sapiens
LLLSGPCGVGLDLDSRLLGASAMRRSHSLSC

SEQ ID NO: 1909 - protein, 57 aa, Homo sapiens
LPRGVFIILNLGIWALINSAFLGLGERDGLPPGAHDLSSSKPIMYDSCVAVARLRLP

SEQ ID NO: 1910 - protein, 204 aa, Homo sapiens [sequence omitted]

SEQ ID NO: 1911 - protein, 114 aa, Homo sapiens [sequence omitted]

SEQ ID NO: 1912 - protein, 82 aa, Homo sapiens
LWQALLALLCWLWHGLAHPASWLQPLGPPATPPGSPPCSLLLDSSLSSNWDDDSLGPSLSPEAVLARTVGSTSTPRSRCTPR

SEQ ID NO: 1913 - protein, 832 aa, Homo sapiens
LVPWHLPMGWLCSGLLFPVSCLVLLQVASSGNMKVLQEPTCVSDYMSISTCEWKMNGPTNCSTELRLLYQLVFLLSEAHTCIPENNGGAGCVCHLLMDDVVSADNYTLDLWAGQQLLWKGSFKPSEHVKPRAPGNLTVHTNVSDTLLLTWSNPYPPDNYLYNHLTYAVNIWSENDPADFRIYNVTYLEPSLRIAASTLKSGISYRARVRAWAQCYNTTWSEWSPSTKWHNSYREPFEQHLLLGVSVSCIVILAVCLLCYVSITKIKKEWWDQIPNPARSRLVAIIIQDAQGSQWEKRSRGQEPAKCPHWKNCLTKLLPCFLEHNMKRDEDPHKAAKEMPFQGSGKSAWCPVEISKTVLWPESISVVRCVELFEAPVECEEEEEVEEEKGSFCASPESSRDDFQEGREGIVARLTESLFLDLLGEENGGFCQQDMGESCLLPPSGSTSAHMPWDEFPSAGPKEAPPWGKEQPLHLEPSPPASPTQSPDNLTCTETPLVIAGNPAYRSFSNSLSQSPCPRELGPDPLLARHLEEVEPEMPCVPQLSEPTTVPQPEPETWEQILRRNVLQHGAAAAPVSAPTSGYQEFVHAVEQGGTQASAVVGLGPPGEAGYKAFSSLLASSAVSPEKCGFGASSGEEGYKPFQDLIPGCPGDPAPVPVPLFTFGLDREPPRSPQSSHLPSSSPEHLGLEPGEKVEDMPKPPLPQEQATDPLVDSLGSGIVYSALTCHLCGHLKQCHGQEDGGQTPVMASPCCGCCCGDRSSPPTTPLRAPDPSPGGVPLEASLCPASLAPSGISEKSKSSSSFHPAPGNAQSSSQTPKIVNFVSVGPTYMRVS

SEQ ID NO: 1914 - protein, 130 aa, Homo sapiens
VPWHLPMGWLCSGLLFPVSCLVLLQVASSGNMKVLQEPTCVSDYMSISTCEWKMNGPTNCSTELRLLYQLVFLLSEAHTCIPENNGGAGCVCHLLMDDVVSADNYTLDLWAGQQLLWKGSFKPSEHVQNL

SEQ ID NO: 1915 - protein, 91 aa, Homo sapiens
LNPLASPPPSAAAPCTPAPLLCQELATTSTMPYQYPALTPEQKKELSDIAHRIVAPGKGILAADESTGAGRRQNGWRVQGWEWQADPLIPM

SEQ ID NO: 1916 - protein, 40 aa, Homo sapiens
MLGNLPKITQLEQAFESSQKYKEGKYIIELNHMIKDNGWD

SEQ ID NO: 1917 - protein, 77 aa, Homo sapiens
LNHLVPGRGRPLGGDARREGASVGGTSRDWSEEGICLTVDPWGSTLSSEMLQLGPPLSERSFAALKLTGEGKASPGV

SEQ ID NO: 1918 - protein, 923 aa, Homo sapiens
LESPLEKDPRVLGAQSVPRGRALKGLSPLGLDSAFRLFPDPRAGPWNTAVLSSGMEPETALWGPDLQGPEQSPNDAHRGAESENEEESPRQESSGEEIIMGDPAQSPESKDSTEMSLERSSQDPSVPQNPPTPLGHSNPLDHQIPLDPPAPEVVPTPSDWTKACEASWQWGALTTWNSPPVVPANEPSLRELVQGRPAGAEKPYICNECGKSFSQWSKLLRHQRIHTGERPNTCSECGKSFTQSSHLVQHQRTHTGEKPYKCPDCGKCFSWSSNLVQHQRTHTGEKPYKCTECEKAFTQSTNLIKHQRSHTGEKPYKCGECRRAFYRSSDLIQHQATHTGEKPYKCPECGKRFGQNHNLLKHQKIHAGEKPYRCTECGKSFIQSSELTQHQRTHTGEKPYECLECGKSFGHSSTLIKHQRTHLREDPFKCPVCGKTFTLSATLLRHQRTHTGERPYKCPECGKSFSVSSNLINHQRIHRGERPYICADCGKSFIMSSTLIRHQRIHTGEKPYKCSDCGKSFIRSSHLIQHRRTHTGEKPYKCPECGKSFSQSSNLITHVRTHMDENLFVCSDCGKAFLEAHELEQHRVIHERGKTPARRAQGDSLLGLGDPSLLTPPPGAKPHKCLVCGKGFNDEGIFMQHQRIHIGENPYKNADGLIAHAAPKPPQLRSPRLPFRGNSYPGAAEGRAEAPGQPLKPPEGQEGFSQRRGLLSSKTYICSHCGESFLDRSVLLQHQLTHGNEKPFLFPDYRIGLGEGAGPSPFLSGKPFKCPECKQSFGLSSELLLHQKVHAGGKSSQKSPELGKSSSVLLEHLRSPLGARPYRCSDCRASFLDRVALTRHQETHTQEKPPNPEDPPPEAVTLSTDQEGEGETPTPTESSSHGEGQNPKTLVEEKPYLCPECGAGFTEVAALLLHRSCHPGVSL

SEQ ID NO: 1919 - protein, 1170 aa, Homo sapiens
VVPATPGSPPSRFWLLPAMALRVLLLTALTLCHGFNLDTENAMTFQENARGFGQSVVQLQGSRVVVGAPQEIVAANQRGSLYQCDYSTGSCEPIRLQVPVEAVNMSLGLSLAATTSPPQLLACGPTVHQTCSENTYVKGLCFLFGSNLRQQPQKFPEALRGCPQEDSDIAFLIDGSGSIIPHDFRRMKEFVSTVMEQLKKSKTLFSLMQYSEEFRIHFTFKEFQNNPNPRSLVKPITQLLGRTHTATGIRKVVRELFNITNGARKNAFKILVVITDGEKFGDPLGYEDVIPEADREGVIRYVIGVGDAFRSEKSRQELNTIASKPPRDHVFQVNNFEALKTIQNQLREKIFAIEGTQTGSSSSFEHEMSQEGFSAAITSNGPLLSTVGSYDWAGGVFLYTSKEKSTFINMTRVDSDMNDAYLGYAAAIILRNRVQSLVLGAPRYQHIGLVAMFRQNTGMWESNANVKGTQIGAYFGASLCSVDVDSNGSTDLVLIGAPHYYEQTRGGQVSVCPLPRGRARWQCDAVLYGEQGQPWGRFGAALTVLGDVNGDKLTDVAIGAPGEEDNRGAVYLFHGTSGSGISPSHSQRIAGSKLSPRLQYFGQSLSGGQDLTMDGLVDLTVGAQGHVLLLRSQPVLRVKAIMEFNPREVARNVFECNDQVVKGKEAGEVRVCLHVQKSTRDRLREGQIQSVVTYDLALDSGRPHSRAVFNETKNSTRRQTQVLGLTQTCETLKLQLPNCIEDPVSPIVLRLNFSLVGTPLSAFGNLRPVLAEDAQRLFTALFPFEKNCGNDNICQDDLSITFSFMSLDCLVVGGPREFNVTVTVRNDGEDSYRTQVTFFFPLDLSYRKVSTLQNQRSQRSWRLACESASSTEVSGALKSTSCSINHPIFPENSEVTFNITFDVDSKASLGNKLLLKANVTSENNMPRTNKTEFQLELPVKYAVYMVVTSHGVSTKYLNFTASENTSRVMQHQYQVSNLGQRSLPISLVFLVPVRLNQTVIWDRPQVTFSENLSSTCHTKERLPSHSDFLAELRKAPVVNCSIAVCQRIQCDIPFFGIQEEFNATLKGNLSFDWYIKTSHNHLLIVSTAEILFNDSVFTLLPGQGAFVRSQTETKVEPFEVPNPLPLIVGSSVGGLLLLALITAALYKLGFFKRQYKDMMSEGGPPGAEPQ

SEQ ID NO: 1920 - protein, 1171 aa, Homo sapiens
VVPATPGSPPSRFWLLPAMALRVLLLTALTLCHGFNLDTENAMTFQENARGFGQSVVQLQGSRVVVGAPQEIVAANQRGSLYQCDYSTGSCEPIRLQVPVEAVNMSLGLSLAATTSPPQLLACGPTVHQTCSENTYVKGLCFLFGSNLRQQPQKFPEALRGCPQEDSDIAFLIDGSGSIIPHDFRRMKEFVSTVMEQLKKSKTLFSLMQYSEEFRIHFTFKEFQNNPNPRSLVKPITQLLGRTHTATGIRKVVRELFNITNGARKNAFKILVVITDGEKFGDPLGYEDVIPEADREGVIRYVIGVGDAFRSEKSRQELNTIASKPPRDHVFQVNNFEALKTIQNQLREKIFAIEGTQTGSSSSFEHEMSQEGFSAAITSNGPLLSTVGSYDWAGGVFLYTSKEKSTFINMTRVDSDMNDAYLGYAAAIILRNRVQSLVLGAPRYQHIGLVAMFRQNTGMWESNANVKGTQIGAYFGASLCSVDVDSNGSTDLVLIGAPHYYEQTRGGQVSVCPLPRGQRARWQCDAVLYGEQGQPWGRFGAALTVLGDVNGDKLTDVAIGAPGEEDNRGAVYLFHGTSGSGISPSHSQRIAGSKLSPRLQYFGQSLSGGQDLTMDGLVDLTVGAQGHVLLLRSQPVLRVKAIMEFNPREVARNVFECNDQVVKGKEAGEVRVCLHVQKSTRDRLREGQIQSVVTYDLALDSGRPHSRAVFNETKNSTRRQTQVLGLTQTCETLKLQLPNCIEDPVSPIVLRLNFSLVGTPLSAFGNLRPVLAEDAQRLFTALFPFEKNCGNDNICQDDLSITFSFMSLDCLVVGGPREFNVTVTVRNDGEDSYRTQVTFFFPLDLSYRKVSTLQNQRSQRSWRLACESASSTEVSGALKSTSCSINHPIFPENSEVTFNITFDVDSKASLGNKLLLKANVTSENNMPRTNKTEFQLELPVKYAVYMVVTSHGVSTKYLNFTASENTSRVMQHQYQVSNLGQRSLPISLVFLVPVRLNQTVIWDRPQVTFSENLSSTCHTKERLPSHSDFLAELRKAPVVNCSIAVCQRIQCDIPFFGIQEEFNATLKGNLSFDWYIKTSHNHLLIVSTAEILFNDSVFTLLPGQGAFVRSQTETKVEPFEVPNPLPLIVGSSVGGLLLLALITAALYKLGFFKRQYKDMMSEGGPPGAEPQ

SEQ ID NO: 1921 - protein, 104 aa, Homo sapiens
LVKPITQLLGRTHTATGIRKVVRELFNITNGARKNAFKILVVITDGEKFGDPLGYEDVIPEADREGVIRYVIGVGNAALRLMLLWRVSMWIHPPFNLQILLKSK

SEQ ID NO: 1922 - protein, 615 aa, Homo sapiens
LGAHASGPWPRGQRPEPVPRPRARPSRSSSRGCPGGSERGQRQPCGEGGGARGTCDCQELLPPPPAPMAHIPSGGAPAAGAAPMGPQYCVCKVELSVSGQNLLDRDVTSKSDPFCVLFTENNGRWIEYDRTETAINNLNPAFSKKFVLDYHFEEVQKLKFALFDQDKSSMRLDEHDFLGQFSCSLGTIVSSKKITRPLLLLNDKPAGKGLITIAAQELSDNRVITLSLAGRRLDKKDLFGKSDPFLEFYKPGDDGKWMLVHRTEVIKYTLDPVWKPFTVPLVSLCDGDMEKPIQVMCYDYDNDGGHDFIGEFQTSVSQMCEARDSVPLEFECINPKKQRKKKNYKNSGIIILRSCKINRDYSFLDYILGGCQLMFTVGIDFTASNGNPLDPSSLHYINPMGTNEYLSAIWAVGQIIQDYDSDKMFPALGFGAQLPPDWKVSHEFAINFNPTNPFCSGVDGIAQAYSACLPHIRFYGPTNFSPIVNHVARFAAQATQQRTATQYFILLIITDGVISDMEETRHAVVQASKLPMSIIIVGVGNADFAAMEFLDGDSRMLRSHTGEEAARDIVQFVPFREFRNAAKETLAKAVLAELPQQVVQYFKHKNLPPTNSEPA

SEQ ID NO: 1923 - protein, 105 aa, Homo sapiens
LQTPGLRHTGQSMDRLQTALLVVLVLLAVALQATEAGPYGANMEDSVCCRDYVRYRLPLRVVKHFYWTSDSCPRPGVVLLTFRDKEICADPRVPWVKMILNKLSQ

SEQ ID NO: 1924 - protein, 81 aa, Homo sapiens
LSPLFEAPVREQWLGWPSFKVSVLLKKGGRGTLTHQPRRLLPANKNPSSATHVLNVSIVCLMPQRSPDRVSLCHTGWSAVV

SEQ ID NO: 1925 - protein, 214 aa, Homo sapiens
MTPQSLLQTTLFLLSLLFLVQGAHGRGHREDFRFCSQRNQTHRSSLHYKPTPDLRISIENSEEALTVHAPFPAAHPASRSFPDPRGLYHFCLYWNRHAGRLHLLYGKRDFLLSDKASSLLCFQHQEESLAQGPPLLATSVTSWWSPQNISLPSAASFTFSFHSPPHTAAHNASVDMCELKRDLQLLSQFLKHPQKASRRPSAAPASHCRAWSRN

SEQ ID NO: 1926 - protein, 231 aa, Homo sapiens
VEIIFMGLARERHGPSFSLSPQNCLRMVATQPIPKGHEIFNTYGQMANWQLIHMYGFVEPYPDNTDDTADIQMVTVREAALQGTKTEAERHLVYERWDFLCKLEMVGEEGAFVIGREEVLTEEELTTTLKVLCMPAEEFRELKDQDGGGDDKREEGSLTITNIPKLKASWRQLLQNSVLLTLQTYATDLKTDQGLLSNKEVYAKLSWREQQALQVRYGQKMILHQLLELTS

SEQ ID NO: 1927 - protein, 57 aa, Homo sapiens
LAFDTLILALQLALGFSLAVYGASYHSMSSMARAAFSEDGALMDGGMDLNMEQGMAE

SEQ ID NO: 1928 - protein, 270 aa, Homo sapiens
LTGMRVAAATAAAGAGPAMAVWTRATKAGLVELLLRERWVRVVAELSGESLSLTGDAAAAELEPALGPAAAAFNGLPNGGGAGDSLPGSPSRGLGPPSPPAPPRGPAGEAGASPPVRRVRVVKQEAGGLGISIKGGRENRMPILISKIFPGLAADQSRALRLGDAILSVNGTDLRQATHDQAVQALKRAGKEVLLEVKFIREVTPYIKKPSLVSDLPWEGAAPQSPSFSGSEDSGSPKHQNSTKDRKIIPLKMCFAARNLSMPDLENRQN

SEQ ID NO: 1929 - protein, 707 aa, Homo sapiens
VRRARRGLKMAACGRVRRMFRLSAALHLLLLFAAGAEKLPGQGVHSQGQGPGANFVSFVGQAGGGGPAGQQLPQLPQSSQLQQQQQQQQQQQQPQPPQPPFPAGGPPARRGGAGAGGGWKLAEEESCREDVTRVCPKHTWSNNLAVLECLQDVREPENEISSDCNHLLWNYKLNLTTDPKFESVAREVCKSTITEIKECADEPVGKGYMVSCLVDHRGNITEYQCHQYITKMTAIIFSDYRLICGFMDDCKNDINILKCGSIRLGEKDAHSQGEVVSCLEKGLVKEAEEREPKIQVSELCKKAILRVAELSSDDFHLDRHLYFACRDDRERFCENTQAGEGRVYKCLFNHKFEESMSEKCREALTTRQKLIAQDYKVSYSLAKSCKSDLKKYRCNVENLPRSREARLSYLLMCLESAVHRGRQVSSECQGEMLDYRRMLMEDFSLSPEIILSCRGEIEHHCSGLHRKGRTLHCLMKVVRGEKGNLGMNCQQALQTLIQETDPGADYRIDRALNEACESVIQTACKHIRSGDPMILSCLMEHLYTEKMVEDCEHRLLELQYFISRDWKLDPVLYRKCQGDASRLCHTHGWNETSEFMPQGAVFSCLYRHAYRTEEQGRRLSRECRAEVQRILHQRAMDVKLDPALQDKCLIDLGKWCSEKTETGQELECLQDHLDDLVVECRDIVGNLTELESEAEREYVFKNLPFKV

SEQ ID NO: 1930 - protein, 121 aa, Homo sapiens
VICPPQPPKVLGLQTVTATPRLECNGVISAHCNLRFPGSTDSPASASRVAGTTGGKRDEELVLPINSSLSVTLHQDQLKTTTTAVISKDFTEDRIWLNGREEDVGQPRLQACLRESELGSP

SEQ ID NO: 1931 - protein, 475 aa, Homo sapiens
LRFEISRGSRTTSAVNLRLLVLLMATLILCRVGAQPPTGAEEGACLVDLITSSPQCLHGLVGWVHGHAASCGALPHLQRTLSSEYCGVIQVVWGCDQGHDYTMDTSSSCKAFLLDSALAVKWPWDKETAPRLPQHRGWNPGDAPQTSQGRGTGTPVGAETKTLPSTDVAQPPSDSDAVGPRSGFPPQPSLPLCRAPGQLGEKQLPSSTSDDRVKDEFSDLSEGDVLSEDENDKKQNAQSSDESFEPYPERKVSGKKSESKEAKKSEEPRIRKKPGPKPGWKKKLRCEREELPTIYKCPYQGCTAVYRGADGMKKHIKEHHEEVRERPCPHPGCNKVFMIDRYLQRHVKLIHTEVRNYICDECGQTFKQRKHLLVHQMRHSGAKPLQCEVCGFQCRQRASLKYHMTKHKAETELDFACDQCGRRFEKAHNLNVHMSMVHPLTQTQDKALPLEAEPPPGPPSPSVTTEGQAVKPEPT

SEQ ID NO: 1932 - protein, 801 aa, Homo sapiens
LDRTMAVQGSQRRLLGSLNSTPTAIPQLGLAANQTGARCLEVSISDGLFLSLGLVSLVENALVVATIAKNRNLHSPMYCFICCLALSDLLVSGSNVLETAVILLLEAGALVARAAVLQQLDNVIDVITCSSMLSSLCFLGAIAVDRYISIFYALRYHSIVTLPRARRAVAAIWVASVVFSTLFIAYYDHVAVLLCLVVFFLAMLVLMAVLYVHMLARACQHAQGIARLHKRQRPVHQGFGLKGAVTLTILLGIFFLCWGPFFLHLTLIVLCPEHPTCGCIFKNFNLFLALIICNAIIDPLIYAFHSQELRRTLKEVLTCSCSQDRALVSWDVKSLGGSVCQELLPQQPQEKGLCDQKASSTALQRLLQKEFWEVISDEHGIDPSGNYVGDSDLQLERISVYYNEASSHKYVPRAILVDLEPGTMDSVRSGAFGHLFRPDNFIFGQSGAGNNWAKGHYTEGAELVDSVLDVVRKECENCDCLQGFQLTHSLGGGTGSGMGTLLISKVREEYPDRIMNTFSVVPSPKVSDTVVEPYNATLSIHQLVENTDETYCIDNEALYDICFRTLKLATPTYGDLNHLVSATMSGVTTSLRFPGQLNADLRKLAVNMVPFPRLHFFMPGFAPLTARGSQQYRALTVPELTQQMFDAKNMMAACDPRHGRYLTVATVFRGRMSMKEVDEQMLAIQSKNSSYFVEWIPNNVKVAVCDIPPRGLKMSSTFIGNSTAIQELFKRISEQFTAMFRRKAFLHWYTGEGMDEMEFTEAESNMNDLVSEYQQYQDATAEEEGEMYEDDEEESEAQGPK

SEQ ID NO: 1933 - protein, 517 aa, Homo sapiens
VETGRHLRHSPRTPLNRDREEPQAARPQQQPHEHTVGQGGASLENKRSISRLSKLESFLREKRETGTGPRHPHTALCTQTGHRRPQFWEVISDEHGIDPSGNYVGDSDLQLERISVYYNEASSHKYVPRAILVDLEPGTMDSVRSGAFGHLFRPDNFIFGQSGAGNNWAKGHYTEGAELVDSVLDVVRKECENCDCLQGFQLTHSLGGGTGSGMGTLLISKVREEYPDRIMNTFSVVPSPKVSDTVVEPYNATLSIHQLVENTDETYCIDNEALYDICFRTLKLATPTYGDLNHLVSATMSGVTTSLRFPGQLNADLRKLAVNMVPFPRLHFFMPGFAPLTARGSQQYRALTVPELTQQMFDAKNMMAACDPRHGRYLTVATVFRGRMSMKEVDEQMLAIQSKNSSYFVEWIPNNVKVAVCDIPPRGLKMSSTFIGNSTAIQELFKRISEQFTAMFRRKAFLHWYTGEGMDEMEFTEAESNMNDLVSEYQQYQDATAEEEGEMYEDDEEESEAQGPK

SEQ ID NO: 1934 - protein, 95 aa, Homo sapiens
MREIVHIQAGQCGNQIGAKFWEVISDEHGIDPSGNYVGDSDLQLERISVYYNEASCECLPQPPYPSPGLTRSQRLTDQVSAPGLTSSQHLCPPMG

SEQ ID NO: 1935 - protein, 60 aa, Homo sapiens
LRESETLSASIRRADPAGAAAAMDDREDLVYQAKLAEQAERYDGEEQNKEALQDVEDENQ

SEQ ID NO: 1936 - protein, 129 aa, Homo sapiens
LRESETLSASIRRADPAGAAAAMDDREDLVYQAKLAEQAERYDGELGGQRGAGILGPSAAAHRGREQETKWRHRLRAWPGGLGSGSRKWPGSSRGDGRLYALECDPFAVLNCKQLAGREAGATGWRSWL

SEQ ID NO: 1937 - protein, 394 aa, Homo sapiens
VAALGGKAPAAGSRGAGPEREPGWGGRALRVRRGAAGEARGGWSWRRGAGELRTMCAQYCISFADVEKAHINIRDSIHLTPVLTSSILNQLTGRNLFFKCELFQKTGSFKIRGALNAVRSLVPDALERKPKAVVTHSSGNHGQALTYAAKLEGIPAYIVVPQTAPDCKKLAIQAYGASIVYCEPSDESRENVAKRVTEETEGIMVHPNQEPAVIAGQGTIALEVLNQVPLVDALVVPVGGGGMLAGIAITVKALKPSVKVYAAEPSNADDCYQSKLKGKLMPNLYPPETIADGVKSSIGLNTWPIIRDLVDDIFTVTEDEIKCATQLVWERMKLLIEPTAGVGVAAVLSQHFQTVSPEVKNICIVLSGGNVDLTSSITWVKQAERPASYQSVSV

SEQ ID NO: 1938 - protein, 256 aa, Homo sapiens
VTERFTTVALRQYRRRKMAATLLAARGAGPAPAWGPEAFTPDWESREVSTGTTIMAVQFDGGVVLGADSRTTTGSYIANRVTDKLTPIHDRIFCCRSGSAADTQAVADAVTYQLGFHSIELNEPPLVHTAASLFKEMCYRYREDLMAGIIIAGWDPQEGGQVYSVPMGGMMVRQSFAIGGSGSSYIYGYVDATYREGMTKEECLQFTANALALAMERDGSSGGVIRLAAIAESGVERQVLLGDQIPKFAVATLPPA

SEQ ID NO: 1939 - protein, 61 aa, Homo sapiens
VSAIHCQCFLLLSTALALAMERDGSSGGVIRLAAIAESGVERQVLLGDQIPKFAVATLPPA

SEQ ID NO: 1940 - protein, 664 aa, Homo sapiens
LCLRRSFCLPVLMPLLLLLLLLPSPLHPHPICEVSKVASHLEVNCDKRNLTALPPDLPKDTTILHLSENLLYTFSLATLMPYTRLTQLNLDRCELTKLQVDGTLPVLGTLDLSHNQLQSLPLLGQTLPALTVLDVSFNRLTSLPLGALRGLGELQELYLKGNELKTLPPGLLTPTPKLEKLSLANNNLTELPAGLLNGLENLDTLLLQENSLYTIPKGFFGSHLLPFAFLHGNPWLCNCEILYFRRWLQDNAENVYVWKQGVDVKAMTSNVASVQCDNSDKFPVYKYPGKGCPTLGDEGDTDLYDYYPEEDTEGDKVRATRTVVKFPTKAHTTPWGLFYSWSTASLDSQMPSSLHPTQESTKEQTTFPPRWTPNFTLHMESITFSKTPKSTTEPTPSPTTSEPVPEPAPNMTTLEPTPSPTTPEPTSEPAPSPTTPEPTSEPAPSPTTPEPTSEPAPSPTTPEPTPIPTIATSPTILVSATSLITPKSTFLTTTKPVSLLESTKKTIPELDQPPKLRGVLQGHLESSRNDPFLHPDFCCLLPLGFYVLGLFWLLFASVVLILLLSWVGHVKPQALDSGQGAALTTATQTTHLELQRGRQVTVPRAWLLFLRGSLPTFRSSLFLWVRPNGRVGPLVAGRRPSALSQGRGQDLLSTVSIRYSGHSL

SEQ ID NO: 1941 - protein, 638 aa, Homo sapiens
LCLRRSFCLPVLMPLLLLLLLLPSPLHPHPICEVSKVASHLEVNCDKRNLTALPPDLPKDTTILHLSENLLYTFSLATLMPYTRLTQLNLDRCELTKLQVDGTLPVLGTLDLSHNQLQSLPLLGQTLPALTVLDVSFNRLTSLPLGALRGLGELQELYLKGNELKTLPPGLLTPTPKLEKLSLANNNLTELPAGLLNGLENLDTLLLQENSLYTIPKGFFGSHLLPFAFLHGNPWLCNCEILYFRRWLQDNAENVYVWKQGVDVKAMTSNVASVQCDNSDKFPVYKYPGKGCPTLGDEGDTDLYDYYPEEDTEGDKVRATRTVVKFPTKAHTTPWGLFYSWSTASLDSQMPSSLHPTQESTKEQTTFPPRWTPNFTLHMESITFSKTPKSTTEPTPSPTTSEPVPEPAPNMTTLEPTPSPTTPEPTSEPAPSPTTPEPTPIPTIATSPTILVSATSLITPKSTFLTTTKPVSLLESTKKTIPELDQPPKLRGVLQGHLESSRNDPFLHPDFCCLLPLGFYVLGLFWLLFASVVLILLLSWVGHVKPQALDSGQGAALTTATQTTHLELQRGRQVTVPRAWLLFLRGSLPTFRSSLFLWVRPNGRVGPLVAGRRPSALSQGRGQDLLSTVSIRYSGHSL

SEQ ID NO: 1942 - protein, 1118 aa, Homo sapiens
LGPGRQLRRAGVSGAMAGASVKVAVRVRPFNARETSQDAKCVVSMQGNTTSIINPKQSKDAPKSFTFDYSYWSHTSTEDPQFASQQQVYRDIGEEMLLHAFEGYNVCIFAYGQTGAGKSYTMMGRQEPGQQGIVPQLCEDLFSRVSENQSAQLSYSVEVSYMEIYCERVRDLLNPKSRGSLRVREHPILGPYVQDLSKLAVTSYADIADLMDCGNKARTVAATNMNETSSRSHAVFTIVFTQRCHDQLTGLDSEKVSKISLVDLAGSERADSSGARGMRLKEGANINKSLTTLGKVISALADMQSKKRKSDFIPYRDSVLTWLLKENLGGNSRTAMIAALSPADINYEETLSTLRYADRTKQIRCNAIINEDPNARLIRELQEEVARLRELLMAQGLSASALEGLKTEEGSVRGALPAVSSPPAPVSPSSPTTHNGELEPSFSPNTESQIGPEEAMERLQETEKIIAELNETWEEKLRKTEALRMEREALLAEMGVAVREDGGTVGVFSPKKTPHLVNLNEDPLMSECLLYHIKDGVTRVGQVDMDIKLTGQFIREQHCLFRSIPQPDGEVVVTLEPCEGAETYVNGKLVTEPLVLKSGNRIVMGKNHVFRFNHPEQARLERERGVPPPPGPPSEPVDWNFAQKELLEQQGIDIKLEMEKRLQDLENQYRKEKEEADLLLEQQRLYADSDSGDDSDKRSCEESWRLISSLREQLPPTTVQTIVKRCGLPSSGKRRAPRRVYQIPQRRRLQGKDPRWATMADLKMQAVKEICYEVALADFRHGRAEIEALAALKMRELCRTYGKPDGPGDAWRAVARDVWDTVGEEEGGGAGSGGGSEEGARGAEVEDLRAHIDKLTGILQEVKLQNSSKDRELQALRDRMLRMERVIPLAQDHEDENEEGGEVPWAPPEGSEAAEEAAPSDRMPSARPPSPPLSSWERVSRLMEEDPAFRRGRLRWLKQEQLRLQGLQGSGGRGGGLRRPPARFVPPHDCKLRFPFKSNPQHRESWPGMGSGEAPTPLQPPEEVTPHPATPARRPPSPRRSHHPRRNSLDGGGRSRGAGSAQPEPQHFQPKKHNSYPQPPQPYPAQRPPGPRYPPYTTPPRMRRQRSAPDLKESGAAV

SEQ ID NO: 1943 - protein, 78 aa, Homo sapiens
LHVVPMARYEEVSVSGFEEFHRAVEQHNGKTIFAYFTGSKDAGGKSWCPDCVQGEAGIRGLLSNGNGRKVEPTARRGA

SEQ ID NO: 1944 - protein, 80 aa, Homo sapiens
LHVVPMARYEEVSVSGFEEFHRAVEQHNGKTIFAYFTGSKDAGGKSWCPDCVQAEPVVREGLKHISEGCVFIYCQVGEKP

SEQ ID NO: 1945 - protein, 85 aa, Homo sapiens
LHVVPMARYEEVSVSGFEEFHRAVEQHNGKTIFAYFTGSKDAGGKSWCPDCVQAEPVVREGLKHISEGCVFIYCQVGEKPYLKNW

SEQ ID NO: 1946 - protein, 8 aa, Homo sapiens
MVFYLLLS

SEQ ID NO: 1947 - protein, 395 aa, Homo sapiens
VPPLGRGGPRPVGPGHQRPSPEAQKRQAEARSGRYGHARRVSRGCPSPGAPSVGGARGPAGPAMLLETQDALYVALELVIAALSVAGNVLVCAAVGTANTLQTPTNYFLVSLAAADVAVGLFAIPFAITISLGFCTDFYGCLFLACFVLVLTQSSIFSLLAVAVDRYLAICVPLRYKSLVTGTRARGVIAVLWVLAFGIGLTPFLGWNSKDSATNNCTEPWDGTTNESCCLVKCLFENVVPMSYMVYFNFFGCVLPPLLIMLVIYIKIFLVACRQLQRTELMDHSRTTLQREIHAAKSLAMIVGIFALCWLPVHAVNCVTLFQPAQGKNKPKWAMNMAILLSHANSVVNPIVYAYRNRDFRYTFHKIISRYLLCQADVKSGNGQAGVQPALGVGL

SEQ ID NO: 1948 - protein, 184 aa, Homo sapiens
MTTSWASAVLMESTGWVRQGPGGLRGCPRARSLLTSCPSSPGLQNMHLLTLKQKYELRVDLEDFENNTAYAKYADFSISPNAVSAEEDGYTLFVAGFEDGGAGDSLSYHSGQKFSTFDRDQDLFVQNCAALSSGAFWFRSCHFANLNGFYLGGSHLSYANGINWAQWKGFYYSLKRTEMKIRRA

SEQ ID NO: 1949 - protein, 261 aa, Homo sapiens
LSRTDSMKALLALPLLLLLSTPPCAPQVSGIRGDALERFCLQQPLDCDDIYAQGYQSDGVYLIYPSGPSVPVPVFCDMTTEGGKWTVFQKRFNGSVSFFRGWNDYKLGFGRADGEYWLGLQNMHLLTLKQKYELRVDLEDFENNTAYAKYADFSISPNAVSAEEDGYTLFVAGFEDGGAGDSLSYHSGQKFSTFDRDQDLFVQNCAALSSGAFWFRSCHFANLNGFYLGGSHLSYANGINWAQWKGFYYSLKRTEMKIRRA

SEQ ID NO: 1950 - protein, 157 aa, Homo sapiens
LSRTDSMKALLALPLLLLLSTPPCAPQVSGIRGDALERFCLQQPLDCDDIYAQGYQSDGVYLIYPSGPSVPVPVFCDMTTEGGKWTVFQKRFNGSVSFFRGWNDYKLGFGRADGEYWLGKAGTRWAEGLPQGQVLVDQLPLLPRAAEHAPPDTEAEV

SEQ ID NO: 1951 - protein, 132 aa, Homo sapiens
LCLWLRLLTGCAQGAVTMPHSYPALSAEQKKELSDIALRIVAPGKGILAADESVGSMAKRLSQIGVENTEENRRLYRQVLFSADDRVKKCIGGVIFFHETLYQKDDNGVPFVRTIQDKGIVVGIKVQPLALL

SEQ ID NO: 1952 - protein, 95 aa, Homo sapiens
VFGGWAWAWWCISDTQRISLEIMTLQPRCEDVETAEGVALTVTGVAQVKIMTEKELLAVACEQFLGKNVQDIKNVVLQTLEGHLRSILGEALFSL

SEQ ID NO: 1953 - protein, 600 aa, Homo sapiens
LASAAALAWPGGNVDIEQLDPRGRTPLHLATTLGHLECARVLLAHGADVGRENRSGWTGGQPCSPQPHSRGLPSIIDLWLAEGSCPVTLPRPPPVLQEAAQDFYVEMKWEFTSWVPLVSKICPSDTYKVWKSGQNLRVDTTLLGFDHMTWQRGNRSFVFRGQDTSAVVMEIDHDRRVVYTETLALAGQDRELLLAAAQPTEEQVLSRLTAPVVTTQLDTKNISFERNKTGILGWRSEKTEMVNGYEAKVYGASNVELITRTRTEHLSEQHKGKVKGCKTPLQSFLGIAEQHGGPQNGTLITQTLSQANPTAITAEEYFNPNFELGNRDMGRPMELTTKTQKFKAKLWLCEEHPLSLCEQVAPIIDLMAVSNALFAKLRDFITLRLPPGFPVKIEIPIFHILNARITFGNLNGCDEPVPSVRGSPSSETPSPGSDSSSVSSSSSTTSCRGCEISPALFEAPRGYSMMGGQREAATRDDDDDLLQFAIQQSLLEAGSEYDQVTIWEALTNSKPGTHPMSYEGRRQDRSAPPTPQRQPAPPASVPSPRPSSGPGSGGHVFRSYDEQLRLAMELSAQEQEERRRRARQEEEELERILRLSLTEQ

SEQ ID NO: 1954 - protein, 489 aa, Homo sapiens
LGSLQPTCEAVPLSPPLSPRPAERLQLPECSGNGATGATGGGTRGRAFRVCVSGVGGRGRGRCESGKMAAAAVVEFQRAQSLLSTDREASIDILHSIVKRDIQENDEEAVQVKEQSILELGSLLAKTGQAAELGGLLKYVRPFLNSISKAKAARLVRSLLDLFLDMEAATGQEVELCLECIEWAKSEKRTFLRQALEARLVSLYFDTKRYQEALHLGSQLLRELKKMDDKALLVEVQLLESKTYHALSNLPKARAALTSARTTANAIYCPPKLQATLDMQSGIIHAAEEKDWKTAYSYFYEAFEGYDSIDSPKAITSLKYMLLCKIMLNTPEDVQALVSGKLALRYAGRQTEALKCVAQASKNRSLADFEKALTDYRAELRDDPIISTHLAKLYDNLLEQNLIRVIEPFSRVQIEHISSLIKLSKADVERKLSQMILDKKFHGILDQGEGVLIIFDEPPVDKTYEAALETIQNMSKVVDSLYNKAKKLT

SEQ ID NO: 1955 - protein, 63 aa, Homo sapiens
LCLTSSFTWVALVFLAGILDQGEGVLIIFDEPPVDKTYEAALETIQNMSKVVDSLYNKAKKLT

SEQ ID NO: 1956 - protein, 108 aa, Homo sapiens
LCFLFYFIYFIFRFSVLISPREGDLGIHPMSSRELPWPRSESSWDATGSESAPQVSPPAPPNLSIPTRITPSAAGRGAREPGGLLEPAQQDPLSPIFCSRARGLSGQS

SEQ ID NO: 1957 - protein, 233 aa, Homo sapiens
VSSGVPAPAFLGTMNPNCARCGKIVYPTEKVNCLDKFWHKACFHCETCKMTLNMKNYKGYEKKPYCNAHYPKQSFTMVADTPENLRLKQQSELQSQVRYKEEFEKNKGKGFSVVADTPELQRIKKTQDQISNVSSCPALRHPCCPLFGPLPASLADASLADVNEASASTTPALQGGPGEELGVPRCLFSVYPQTTSTHSIFFLKGLYSVGACVLNQPPLSLTVVLFSGYRGYR

SEQ ID NO: 1958 - protein, 358 aa, Homo sapiens
MRGELWLLVLVLREAARALSPQPGAGHDEGPGSGWAAKGTVRGWNRRARESPGHVSEPDRTQLSQDLGGGTLAMDTLPDNRTRVVEDNHSYYVSRLYGPSEPHSRELWVDVAEANRSQVKIHTILSNTHRQASRVVLSFDFPFYGHPLRQITIATGGFIFMGDVIHRMLTATQYVAPLMANFNPGYSDNSTVVYFDNGTVFVVQWDHVYLQGWEDKGSFTFQAALHHDGRIVFAYKEIPMSVPEISSSQHPVKTGLSDAFMILNPSPDVPESRRRSIFEYHRIELDPSKVTSMSAVEFTPLPTCLQHRSCDACMSSDLTFNCSWCHVLQRSLNNQDENTYVNCLDSQQCHGSSESRRP

SEQ ID NO: 1959 - protein, 138 aa, Homo sapiens
LEGVANWSTFPSSLFADEKTEAQVWDFQSPGFPGNARQPHSPGYSDPPRFRDAPWEPPPRACWDSRGTPPSGQPPRPAPPAGNGRRCCALAGEPATEGEAGREQAGLGGLLARARALCMVYRRQLTFEEEIAALRSFL

SEQ ID NO: 1960 - protein, 1047 aa, Homo sapiens
LGGCGRRKMARALCPLQALWLLEWVLLLLGPCAAPPAWALNLDPVQLTFYAGPNGSQFGFSLDFHKDSHGRVAIVVGAPRTLGPSQEETGGVFLCPWRAEGGQCPSLLFDLRDETRNVGSQTLQTFKARQGLGASVVSWSDVIVACAPWQHWNVLEKTEEAEKTPVGSCFLAQPESGRRAEYSPCRGNTLSRIYVENDFSWDKRYCEAGFSSVVTQAGELVLGAPGGYYFLGLLAQAPVADIFSSYRPGILLWHVSSQSLSFDSSNPEYFDGYWGYSVAVGEFDGDLNTTEYVVGAPTWSWTLGAVEILDSYYQRLHRLRGEQMASYFGHSVAVTDVNGDGRHDLLVGAPLYMESRADRKLAEVGRVYLFLQPRGPHALGAPSLLLTGTQLYGRFGSAIAPLGDLDRDGYNDIAVAAPYGGPSGRGQVLVFLGQSEGLRSRPSQVLDSPFPTGSAFGFSLRGAVDIDDNGYPDLIVGAYGANQVAVYRAQPVVKASVQLLVQDSLNPAVKSCVLPQTKTPVSCFNIQMCVGATGHNIPQKLSLNAELQLDRQKPRQGRRVLLLGSQQAGTTLNLDLGGKHSPICHTTMAFLRDEADFRDKLSPIVLSLNVSLPPTEAGMAPAVVLHGDTHVQEQTRIVLDCGEDDVCVPQLQLTASVTGSPLLVGADNVLELQMDAANEGEGAYEAELAVHLPQGAHYMRALSNVEGFERLICNQKKENETRVVLCELGNPMKKNAQIGIAMLVSVGNLEEAGESVSFQLQIRSKNSQNPNSKIVLLDVPVRAEAQVELRGNSFPASLVVAAEEGEREQNSLDSWGPKVEHTYELHNNGPGTVNGLHLSIHLPGQSQPSDLLYILDIQPQGGLQCFPQPPVNPLKVDWGLPIPSPSPIHPAHHKRDRRQIFLPEPEQPSRLQDPVLVSCDSAPCTVVQCDLQEMARGQRAMVTVLAFLWLPSLYQRPLDQFVLQSHAWFNVSSLPYAVPPLSLPRGEAQVWTQLLRALEERAIPIWWVLVGVLGGLLLLTILVLAMWKVGFFKRNRPPLEEDDEEGE

SEQ ID NO: 1961 - protein, 452 aa, Homo sapiens
LGRFLPGPGHCPAARGRPSLPGLSSVLAQGSEEEESCTSEITTSLSEEMLDLRGAERCQKGGCVPGRPMGPPRRRCLPAASGPGADVSLWNILRNNIGKDLSKVSMPVQLNEPLNTLQRLCEELEYSSLLDQASRIADPCERMVYIAAFAVSAYSSTYHRAGCKPFNPVLGETYECERPDRGFRFISEQVSHHPPISACHAESENFAFWQDMKWKNKFWGKSLEIVPVGTVNVSLPRFGDHFEWNKVTSCIHNVLSGQRWIEHYGEVLIRNTQDSSCHCKITFCKAKYWSSNVHEVQGAVLSRSGRVLHRLFGKWHEGLYRGPTPGGQCIWKPNSMPPDHERNFGFTQFALELNELTAELKRSLPSTDTRLRPDQRYLEEGNIQAAEAQKRRIEQLQRDRRKVMEENNIVHQARFFRRQTDSSGKEWWVTNNTYWRLRAEPGYGNMDGAVLW

SEQ ID NO: 1962 - protein, 447 aa, Homo sapiens
LGRFLPGPGHCPAARGRPSLPGLSSVLAQGSEEEESCTSEITTSLSEEMLDLRGAERCQKGRPMGPPRRRCLPAASGPGADVSLWNILRNNIGKDLSKVSMPVQLNEPLNTLQRLCEELEYSSLLDQASRIADPCERMVYIAAFAVSAYSSTYHRAGCKPFNPVLGETYECERPDRGFRFISEQVSHHPPISACHAESENFAFWQDMKWKNKFWGKSLEIVPVGTVNVSLPRFGDHFEWNKVTSCIHNVLSGQRWIEHYGEVLIRNTQDSSCHCKITFCKAKYWSSNVHEVQGAVLSRSGRVLHRLFGKWHEGLYRGPTPGGQCIWKPNSMPPDHERNFGFTQFALELNELTAELKRSLPSTDTRLRPDQRYLEEGNIQAAEAQKRRIEQLQRDRRKVMEENNIVHQARFFRRQTDSSGKEWWVTNNTYWRLRAEPGYGNMDGAVLW

SEQ ID NO: 1963 - protein, 858 aa, Homo sapiens
LLPALHPQQGVASPFSMDFQERDPPFLPESAQSSKPSSAQQASELWEVVEEPRVRLGTEGVMPERQEGHLLKKRKWPLKGWHKRYFVLEDGILHYATTRQDITKGKLHGSIDVRLSVMSINKKAQRIDLDTEDNIYHLKIKSQDLFQSWVAQLRAHRLAHRLDMPRGSLPSTAHRKVPGAQLPTAATASALPGLGPREKVSSWLRDSDGLDRCSHELSECQGKLQELHRLLQSLESLHRIPSAPVIPTHQASVTTERPKKGKRTSRMWCTQSFAKDDTIGRVGRLHGSVPNLSRYLESRDSSGTRGLPPTDYAHLQRSFWALAQKVHSSLSSVLAALTMERDQLRDMHQGSELSRMGVSEASTGQRRLHSLSTSSDTTADSFSSLNPEEQEALYMKGRELTPQLSQTSILSLADSHTEFFDACEVLLSASSSENEGSEEEESCTSEITTSLSEEMLDLRGAERCQKGGCVPGRPMGPPRRRCLPAASGPGADVSLWNILRNNIGKDLSKVSMPVQLNEPLNTLQRLCEELEYSSLLDQASRIADPCERMVYIAAFAVSAYSSTYHRAGCKPFNPVLGETYECERPDRGFRFISEQVSHHPPISACHAESENFAFWQDMKWKNKFWGKSLEIVPVGTVNVSLPRFGDHFEWNKVTSCIHNVLSGQRWIEHYGEVLIRNTQDSSCHCKITFCKAKYWSSNVHEVQGAVLSRSGRVLHRLFGKWHEGLYRGPTPGGQCIWKPNSMPPDHERNFGFTQFALELNELTAELKRSLPSTDTRLRPDQRYLEEGNIQAAEAQKRRIEQLQRDRRKVMEENNIVHQARFFRRQTDSSGKEWWVTNNTYWRLRAEPGYGNMDGAVLW

SEQ ID NO: 1964 - protein, 205 aa, Homo sapiens
MAAKVFESIGKFGLALAVAGGVVNSALYNVDAGHRAVIFDRFRGVQDIVVGEGTHFLIPWVQKPIIFDCRSRPRNVPVITGSKDLQNVNITLRILFRPVASQLPRIFTSIGEDYDERVLPSITTEILKSVVARFDAGELITQRELVSRQVSDDLTERAATFGLILDDVSLVRSFGRPRRGRGCSSRLGAWLHFWVDAIRSSLLLC

SEQ ID NO: 1965 - protein, 221 aa, Homo sapiens
LGVDTVLRPRRAGRVGRSCGLGGWALRGVATPRSALRPSSAAGSRVWWSHQLSALPAQRRRPAPPASRTMANLERTFIAIKPDGVQRGLVGEIIKRFEQKGFRLVAMKFLRASEEHLKQHYIDLKDRPFFPGLVKYMNSGPVVAMVWEGLNVVKTGRVMLGETNPADSKPGTIRGDFCIQVGRNIIHGSDSVKSAEKEISLWFKPEELVDYKSCAHDWVYE

SEQ ID NO: 1966 - protein, 106 aa, Homo sapiens
VWWSHQLSALPAQRRRPAPPASRTMANLERTFIAIKPDGVQRGLVGEIIKRFEQKGFRLVAMKFLRASEEHLKQHYIDLKDRPFFPGLVKYMNSGPVVAMEHHSWQ

SEQ ID NO: 1967 - protein, 42 aa, Homo sapiens
LWPWNIIHGSDSVKSAEKEISLWFKPEELVDYKSCAHDWVYE

SEQ ID NO: 1968 - protein, 31 aa, Homo sapiens
MELALRRSPVPRWLLLLPLLLGLNAGRSRRF

SEQ ID NO: 1969 - protein, 122 aa, Homo sapiens
MELALRRSPVPRWLLLLPLLLGLNAGAVIDWPTEEGKEVWDYVTVRKDAYMFWWLYYATNSCKNFSELPLVMWLQGGPGGSSTGFGNFEEIGPLDSDLKPRKTTWCTEKPGQCGNLMHFQEN

SEQ ID NO: 1970 - protein, 210 aa, Homo sapiens
MELALRRSPVPRWLLLLPLLLGLNAGAVIDWPTEEGKEVWDYVTVRKDAYMFWWLYYATNSCKNFSELPLVMWLQGGPGGSSTGFGNFEEIGPLDSDLKPRKTTWLQAASLLFVDNPVGTGFSYVNGSGAYAKDLAMVASDMMVLLKTFFSCHKEFQTVPFYIFSESYGGKMAAGIGLELYKAIQRGTIKCNFAGVALGDSWISPVERRQ

SEQ ID NO: 1971 - protein, 227 aa, Homo sapiens
MELALRRSPVPRWLLLLPLLLGLNAGAVIDWPTEEGKEVWDYVTVRKDAYMFWWLYYATNSCKNFSELPLVMWLQGGPGGSSTGFGNFEEIGPLDSDLKPRKTTWLQAASLLFVDNPVGTGFSYVNGSGAYAKDLAMVASDMMVLLKTFFSCHKEFQTVPFYIFSESYGGKMAAGIGLELYKAIQRGTIKCNFAGVALGDSWISPVDSVLSWGPYLYSMQYQIDVPK

SEQ ID NO: 1972 - protein, 616 aa, Homo sapiens
MGPGRPAPAPWPRHLLRCVLLLGCLHLGRPGAPGDAALPEPNVFLIFSHGLQGCLEAQGGQVRVTPACNTSLPAQRWKWVSRNRLFNLGTMQCLGTGWPGTNTTASLGMYECDREALNLRWHCRTLGDQLSLLLGARTSNISKPGTLERGDQTRSGQWRIYGSEEDLCALPYHEVYTIQGNSHGKPCTIPFKYDNQWFHGCTSTGREDGHLWCATTQDYGKDERWGFCPIKSNDCETFWDKDQLTDSCYQFNFQSTLSWREAWASCEQQGADLLSITEIHEQTYINGLLTGYSSTLWIGLNDLDTSGGWQWSDNSPLKYLNWESDQPDNPSEENCGVIRTESSGGWQNRDCSIALPYVCKKKPNATAEPTPPDRWANVKVECEPSWQPFQGHCYRLQAEKRSWQESKKACLRGGGDLVSIHSMAELEFITKQIKQEVEELWIGLNDLKLQMNFEWSDGSLVSFTHWHPFEPNNFRDSLEDCVTIWGPEGRWNDSPCNQSLPSICKKAGQLSQGAAEEDHGCRKGWTWHSPSCYWLGEDQVTYSEARRLCTDHGSQLVTITNRFEQAFVSSLIYNWEGEYFWTALQDLNSTGSFFWLSGDEVMYTHWNRDQPGEPLI

SEQ ID NO: 1973 - protein, 228 aa, Homo sapiens
LPSPPLSAEDWGDQRCLTALPYICKRSNVTKETQPPDLPTTALGGCPSDWIQFLNKCFQVQGQEPQSRVKWSEAQFSCEQQEAQLVTITNPLEQAFITASLPNVTFDLWIGLHASQRDFQWVEQEPLMYANWAPGEPSGPSPAPSGNKPTSCAVVLHSPSAHFTGRWDDRSCTEETHGFICQKGTGLSAVLLGLRGAAELRGLAGRGAAAAGGLYLRRCGRGLAHHQL

SEQ ID NO: 1974 - protein, 475 aa, Homo sapiens
MGAASGRRGPGLLLPLPLLLLLPPQPALALDPGLQPGNFSADEAGAQLFAQSYNSSAEQVLFQSVAASWAHDTNITAENARRQEEAALLSQEFAEAWGQKAKELYEPIWQNFTDPQLRRIIGAVRTLGSANLPLAKRQQYNALLSNMSRIYSTAKVCLPNKTATCWSLDPDLTNILASSRSYAMLLFAWEGWHNAAGIPLKPLYEDFTALSNEAYKQDGFTDTGAYWRSWYNSPTFEDDLEHLYQQLEPLYLNLHAFVRRALHRRYGDRYINLRGPIPAHLLGDMWAQSWENIYDMVVPFPDKPNLDVTSTMLQQGWNATHMFRVAEEFFTSLELSPMPPEFWEGSMLEKPADGREVVCHASAWDFYNRKDFRIKQCTRVTMDQLSTVHHEMGHIQYYLQYKDLPVSLRRGANPGFHEAIGDVLALSVSTPEHLHKIGLLDRVTNDTEPSIRGSVLLLPETKPTLMLELSFMFQM

SEQ ID NO: 1975 - protein, 542 aa, Homo sapiens
LASSRSYAMLLFAWEGWHNAAGIPLKPLYEDFTALSNEAYKQDGFTDTGAYWRSWYNSPTFEDDLEHLYQQLEPLYLNLHAFVRRALHRRYGDRYINLRGPIPAHLLGDMWAQSWENIYDMVVPFPDKPNLDVTSTMLQQGWNATHMFRVAEEFFTSLELSPMPPEFWEGSMLEKPADGREVVCHASAWDFYNRKDFRIKQCTRVTMDQLSTVHHEMGHIQYYLQYKDLPVSLRRGANPGFHEAIGDVLALSVSTPEHLHKIGLLDRVTNDTESDINYLLKMALEKIAFLPFGYLVDQWRWGVFSGRTPPSRYNFDWWYLRTKYQGICPPVTRNETHFDAGAKFHVPNVTPYIRYFVSFVLQFQFHEALCKEAGYEGPLHQCDIYRSTKAGAKLRKVLQAGSSRPWQEVLKDMVGLDALDAQPLLKYFQPVTQWLQEQNQQNGEVLGWPEYQWHPPLPDNYPEGIDLVTDEAEASKFVEEYDRTSQVVWNEYAEANWNYNTNITTETSKILVGATSPPPNLSMCIHTEMLSRSPHSGAATTF

SEQ ID NO: 1976 - protein, 548 aa, Homo sapiens
LELKAFKPLPDLTNVMATSRKYEDLLWAWEGWRDKAGRAILQFYPKYVELINQAARLNGYVDAGDSWRSMYETPSLEQDLERLFQELQPLYLNLHAYVRRALHRHYGAQHINLEGPIPAHLLGNMWAQTWSNIYDLVVPFPSAPSMDTTEAMLKQGWTPRRMFKEADDFFTSLGLLPVPPEFWNKSMLEKPTDGREVVCHASAWDFYNGKDFRIKQCTTVNLEDLVVAHHEMGHIQYFMQYKDLPVALREGANPGFHEAIGDVLALSVSTPKHLHSLNLLSSEGGSDEHDINFLMKMALDKIAFIPFSYLVDQWRWRVFDGSITKENYNQEWWSLRLKYQGLCPPVPRTQGDFDPGAKFHIPSSVPYIRYFVSFIIQFQFHEALCQAAGHTGPLHKCDIYQSKEAGQRLATAMKLGFSRPWPEAMQLITGQPNMSASAMLSYFKPLLDWLRTENELHGEKLGWPQYNWTPNSARSEGPLPDSGRVSFLGLDLDAQQARVGQWLLLFLGIALLVATLGLSQRLFSIRHRSLHRHSHGPQFGSEVELRHS

SEQ ID NO: 1977 - protein, 175 aa, Homo sapiens
LAGAGLAGPSRLTSPCRTQRVPLLHPRLPPPTSHVPGCRSRPGHPLSWPPGAAPALTAPLPQDAKGGGSSTVQRSKSFSLRAQVKETCAACQKTVYPMERLVADKLIFHNSCFCCKHCHTKLSLGSYAALHGEFYCKPHFQQLFKSKGNYDEGFGRKQHKELWAHKEVDPGTKTA

SEQ ID NO: 1978 - protein, 16 aa, Homo sapiens
VRPRRPIPPRGPGRAW

SEQ ID NO: 1979 - protein, 548 aa, Homo sapiens
LNLLPWHIIFSSFSLCLITMSTNENANTPAARLHRFKNKGKDSTEMRRRRIEVNVELRKAKKDDQMLKRRNVSSFPDDATSPLQENRNNQGTVNWSVDDIVKGINSSNVENQLQATQAARKLLSREKQPPIDNIIRAGLIPKFVSFLGRTDCSPIQFESAWALTNIASGTSEQTKAVVDGGAIPAFISLLASPHAHISEQAVWALGNIAGDGSVFRDLVIKYGAVDPLLALLAVPDMSSLACGYLRNLTWTLSNLCRNKNPAPPIDAVEQILPTLVRLLHHDDPEVLADTCWAISYLTDGPNERIGMVVKTGVVPQLVKLLGASELPIVTPALRAIGNIVTGTDEQTQVVIDAGALAVFPSLLTNPKTNIQKEATWTMSNITAGRQDQIQQVVNHGLVPFLVSVLSKADFKTQKEAVWAVTNYTSGGTVEQIVYLVHCGIIEPLMNLLTAKDTKIILVILDAISNIFQAAEKLGETEKLSIMIEECGGLDKIEALQNHENESVYKASLSLIEKYFSVEEEEDQNVVPETTSEGYTFQVQDGAPGTFNF

SEQ ID NO: 1980 - protein, 95 aa, Homo sapiens
MMISFFFHLLLIVTSSLLGSGTTEENKENDLRPSLPQSYAATVARPSASSASTVPGYSEDGGALRGEVIPEHEFATGPVCLDDENEFPPVSIRNP

SEQ ID NO: 1981 - protein, 226 aa, Homo sapiens
MWLPWALLLLWVPGCFALSKCRTVAGPVGGSLSVQCPYEKEHRTLNKYWCRPPQIFLCDKIVETKGSAGKRNGRVSIRDSPANLSFTVTLENLTEEDAGTYWCGVDTPWLRDFHDPVVEVEVSVFPASTSMTPASITAAKTSTITTAFPPVSSTTLFAVGATHSASIQEETEEVVNSQLPLLLSLLALLLLLLVGASLLAWRMFQKWIKAGDHSELSQNPKQVRGL

SEQ ID NO: 1982 - protein, 289 aa, Homo sapiens
LNEIRRDHQPDPNLASLPASWSPKRQGLERTGSQNSGPGRTTAESLFLVLKRSVLEERGRLPAWYRAAAAAGNCPVLKTDAARPAELRPKPAAPSGARTELLEALTQSAGRAGAASSKPGMDLQRPDSYQGGAGPDFNDHVLHKTILVGDSGVGKTSLLVQFDQGKFIPGSFSATVGIGFTNKVVTVDGVRVKLQIWDTAGQERFRSVTHAYYRDAQALLLLYDITNKSSFDNIRAWLTEIHEYAQRDVVIMLLGNKVSGSGAGSAQPCTSSALAGPITTQEQLSRHPS

SEQ ID NO: 1983 - protein, 302 aa, Homo sapiens
LNEIRRDHQPDPNLASLPASWSPKRQGLERTGSQNSGPGRTTAESLFLVLKRSVLEERGRLPAWYRAAAAAGNCPVLKTDAARPAELRPKPAAPSGARTELLEALTQSAGRAGAASSKPGMDLQRPDSYQGGAGPDFNDHVLHKTILVGDSGVGKTSLLVQFDQGKFIPGSFSATVGIGFTNKVVTVDGVRVKLQIWDTAGQERFRSVTHAYYRDAQALLLLYDITNKSSFDNIRAWLTEIHEYAQRDVVIMLLGNKADMSSERVIRSEDGETLAREYGVPFLETSAKTGMNVELAFLAIAK

SEQ ID NO: 1984 - protein, 336 aa, Homo sapiens
LNEIRRDHQPDPNLASLPASWSPKRQGLERTGSQNSGPGRTTAESLFLVLKRSVLEERGRLPAWYRAAAAAGNCPVLKTDAARPAELRPKPAAPSGARTELLEALTQSAGRAGAASSKPGMDLQRPDSYQGGAGPDFNDHVLHKTILVGDSGVGKTSLLVQFDQGKFIPGSFSATVGIGFTNKVVTVDGVRVKLQIWDTAGQERFRSVTHAYYRDAQALLLLYDITNKSSFDNIRAWLTEIHEYAQRDVVIMLLGNKADMSSERVIRSEDGETLAREYGVPFLETSAKTGMNVELAFLAIAKELKYRAGHQADEPSFQIRDYVESQKKRSSCCSFM

SEQ ID NO: 1985 - protein, 225 aa, Homo sapiens
VRSDYGNSSAADGVPAARSPRGKQATTGDRSRGWMWLMSEAHGAEPVLLREAARPFTQTLRLCVPSGNSKNKVVTVDGVRVKLQIWDTAGQERFRSVTHAYYRDAQALLLLYDITNKSSFDNIRAWLTEIHEYAQRDVVIMLLGNKADMSSERVIRSEDGETLAREYGVPFLETSAKTGMNVELAFLAIAKELKYRAGHQADEPSFQIRDYVESQKKRSSCCSFM

SEQ ID NO: 1986 - protein, 458 aa, Homo sapiens
LPPTTQQLDSHGSCGWGRNRLRSGGGASGRGAGLAGMCAPPRGAPPEHPAPTGLCRSSCAELQARVMAALRQPQVAELLAEARRAFREEFGAEPELAVSAPGRVNLIGEHTDYNQGLVLPMALELMTVLVGSPRKDGLVSLLTTSEGADEPQRLQFPLPTAQRSLEPGTPRWANYVKGVIQYYPAAPLPGFSAVVVSSVPLGGGLSSSASLEVATYTFLQQLCPDSGTIAARAQVCQQAEHSFAGMPCGIMDQFISLMGQKGHALLIDCRSLETSLVPLSDPKLAVLITNSNVRHSLASSEYPVRRRQCEEVARALGKESLREVQLEELEAARDLVSKEGFRRARHVVGEIRRTAQAAAALRRGDYRAFGRLMVESHRSLRDDYEVSCPELDQLVEAALAVPGVYGSRMTGGGFGGCTVTLLEASAAPHAMRHIQEHYGGTATFYLSQAADGAKVLCL

SEQ ID NO: 1987 - protein, 217 aa, Homo sapiens
LLKNRGRRRRRLGIISQPGGGDAMPGAGITMPLARLAPCCLIRAKAVSEKEVDSGNDIYGNPIKRIQYEIKQIKMFKGPEKDIEFIYTAPSSAVCGVSLDVGGKKEYLIAGKAEGDGKMHITLCDFIVPWDTLSTTQKKSLNHRYQMGCECKITRCPMIPCYISSPDECLWMDWVTEKNINGHQAKFFACIKRSDGSCAWYRGAAPPKQEFLDIEDP

SEQ ID NO: 1988 - protein, 215 aa, Homo sapiens
VEGGGGGWASSLSLEEETPCRGLGSPCPLPVSHLAAVCNPPAPPAGLDVLSLSLAPGACFRNSPHLCVLCFAVIRAKAVSEKEVDSGNDIYGNPIKRIQYEIKQIKMFKGPEKDIEFIYTAPSSAVCGVSLDVGGKKEYLIAGKAEGDGKMHITLCDFIVPWDTLSTTQKKSLNHRYQMGCECKVSRSCLCWSIASSQCLQMDGRDFDPWLSRTR

SEQ ID NO: 1989 - protein, 273 aa, Homo sapiens [sequence omitted]

SEQ ID NO: 1990 - protein, 96 aa, Homo sapiens [sequence omitted]

SEQ ID NO: 1991 - protein, 85 aa, Homo sapiens
LWASFIAGGCATFLCQPLDVLKTRLMNSKGEYQGVFHCAVETAKLGPLAFYKGLVPAGIRLIPHTVLTFVFLEQLRKNFGIKVPS

SEQ ID NO: 1992 - protein, 395 aa, Homo sapiens
LPLPETLAGKRATQLASTSGLRARVERQPAPTGPLVWLQLGAGKGPPTGGAGWAGVPSLPVVLFLEEIAKHKGPPVFTQEERYKMVQAIKWVDEVVPAAPYVTTLETLDKYNCDFCVHGNDITLTVDGRDTYEEVKQAGRYRECKRTQGVSTTDLVGRMLLVTKAHHSSQEMSSEYREYADSFGKCPGGRNPWTGVSQFLQTSQKIIQFASGKEPQPGETVIYVAGAFDLFHIGHVDFLEKVHRLAERPYIIAGLHFDQEVNHYKGKNYPIMNLHERTLSVLACRYVSEVVIGAPYAVTAELLSHFKVDLVCHGKTEIIPDRDGSDPYQEPKRRGIFRQIDSGSNLTTDLIVQRIITNRLEYEARNQKKEAKELAFLEAARQQAAQPLGERDGDF

SEQ ID NO: 1993 - protein, 219 aa, Homo sapiens
VRSARPAQAASPPSPGPGPLAPVPAPRGLGARAAPPRPGLGPPGPQCESACSLCPRVMTTPNKGNKALKVKREPGENGTSLTDEELVTMSVRELNQHLRGLSKEEIVQLKQRRRTLKNRGYAASCRVKRVTQKEELEKQKAELQQEVEKLASENASMKLELDALRSKYEALQTFARTVARSPVAPARGPLAAGLGPLVPGKVAATSVITIVKSKTDARS

SEQ ID NO: 1994 - protein, 354 aa, Homo sapiens
LGWGRAPGMVGGGRRVGRDEPVPSVGALGQGSPDSMSVGFIGAGQLAFALAKGFTAAGVLAAHKIMASSPDMDLATVSALRKMGVKLTPHNKETVQHSDVLFLAVKPHIIPFILDEIGADIEDRHIVVSCAAGVTISSIEKKLSAFRPAPRVIRCMTNTPVVVREGATVYATGTHAQVEDGRLMEQLLSSVGFCTEVEEDLIDAVTGLSGSGPAYAFTALDALADGGVKMGLPRRLAVRLGAQALLGAAKMLLHSEQHPGQLKDNVSSPGGATIHALHVLESGGFRSLLINAVEASCIRTRELQSMADQEQVSPAAIKKTILDKVKLDSPAGTALSPSGHTKLLPRSLAPAGKD

SEQ ID NO: 1995 - protein, 1645 aa, Homo sapiens
VSAPFSRPAGHRQSVGEQEPRAQPARARSSARRRPGLGLGLPVERRRAERARPRPRPPPRPRPAARVPGPGQGKGRGGELSNRNRGKILAPRARPPLPLPAAPDAEWGQGQGRRTQDPVPAPLEPLEFGLLQLLALWGLGLALCCLPVSPRCLGTKAPGPLRPRAPTHRRRGAARPALSTMRGLGTCLATLAGLLLTAAGETFSGGCLFDEPYSTCGYSQSEGDDFNWEQVNTLTKPTSDPWMPSGSFMLVNASGRPEGQRAHLLLPQLKENDTHCIDFHYFVSSKSNSPPGLLNVYVKVNNGPLGNPIWNISGDPTRTWNRAELAISTFWPNFYQVIFEVITSGHQGYLAIDEVKVLGHPCTRTPHFLRIQNVEVNAGQFATFQCSAIGRTVAGDRLWLQGIDVRDAPLKEIKVTSSRRFIASFNVVNTTKRDAGKYRCMIRTEGGVGISNYAELVVKEPPVPIAPPQLASVGATYLWIQLNANSINGDGPIVAREVEYCTASGSWNDRQPVDSTSYKIGHLDPDTEYEISVLLTRPGEGGTGSPGPALRTRTKCADPMRGPRKLEVVEVKSRQITIRWEPFGYNVTRCHSYNLTVHYCYQVGGQEQVREEVSWDTENSHPQHTITNLSPYTNVSVKLILMNPEGRKESQELIVQTDEDLPGAVPTESIQGSTFEEKIFLQWREPTQTYGVITLYEITYKAVSSFDPEIDLSNQSGRVSKLGNETHFLFFGLYPGTTYSFTIRASTAKGFGPPATNQFTTKISAPSMPAYELETPLNQTDNTVTVMLKPAHSRGAPVSVYQIVVEEERPRRTKKTTEILKCYPVPIHFQNASLLNSQYYFAAEFPADSLQAAQPFTIGDNKTYNGYWNTPLLPYKSYRIYFQAASRANGETKIDCVQVATKGAATPKPVPEPEKQTDHTVKIAGVIAGILLFVIIFLGVVLVMKKRKLAKKRKETMSSTRQEMTVMVNSMDKSYAEQGTNCDEAFSFMDTHNLNGRSVSSPSSFTMKTNTLSTSVPNSYYPDPFVPTAILVPINDETHTMASDTSSLVQSHTYKKREPADVPYQTGQLHPAIRVADLLQHITQMKCAEGYGFKEEYESFFEGQSAPWDSAKKDENRMKNRYGNIIAYDHSRVRLQTIEGDTNSDYINGNYIDGYHRPNHYIATQGPMQETIYDFWRMVWHENTASIIMVTNLVEVGRVKCCKYWPDDTEIYKDIKVTLIETELLAEYVIRTFAVEKRGVHEIREIRQFHFTGWPDHGVPYHATGLLGFVRQVKSKSPPSAGPLVVHCSAGAGRTGCFIVIDIMLDMAEREGVVDIYNCVRELRSRRVNMVQTEEQYVFIHDAILEACLCGDTSVPASQVRSLYYDMNKLDPQTNSSQIKEEFRTLNMVTPTLRVEDCSIALLPRNHEKNRCMDILPPDRCLPFLITIDGESSNYINAALMDSYKQPSAFIVTQHPLPNTVKDFWRLVLDYHCTSVVMLNDVDPAQLCPQYWPENGVHRHGPIQVEFVSADLEEDIISRIFRIYNAARPQDGYRMVQQFQFLGWPMYRDTPVSKRSFLKLIRQVDKWQEEYNGGEGRTVVHCLNGGGRSGTFCAISIVCEMLRHQRTVDVFHAVKTLRNNKPNMVDLLDQYKFCYEVALEYLNSG

SEQ ID NO: 1996 - protein, 1632 aa, Homo sapiens
VSAPFSRPAGHRQSVGEQEPRAQPARARSSARRRPGLGLGLPVERRRAERARPRPRPPPRPRPAARVPGPGQGKGRGGELSNRNRGKILAPRARPPLPLPAAPDAEWGQGQGRRTQDPVPAPLEPLEFGLLQLLALWGLGLALCCLPVSPRCLGTKAPGPLRPRAPTHRRRGAARPALSTMRGLGTCLATLAGLLLTAAGETFSGGCLFDEPYSTCGYSQSEGDDFNWEQVNTLTKPTSDPWMPSGSFMLVNASGRPEGQRAHLLLPQLKENDTHCIDFHYFVSSKSNSPPGLLNVYVKVNNGPLGNPIWNISGDPTRTWNRAELAISTFWPNFYQVIFEVITSGHQGYLAIDEVKVLGHPCTRTPHFLRIQNVEVNAGQFATFQCSAIGRTVAGDRLWLQGIDVRDAPLKEIKVTSSRRFIASFNVVNTTKRDAGKYRCMIRTEGGVGISNYAELVVKEPPVPIAPPQLASVGATYLWIQLNANSINGDGPIVAREVEYCTASGSWNDRQPVDSTSYKIGHLDPDTEYEISVLLTRPGEGGTGSPGPALRTRTKCADPMRGPRKLEVVEVKSRQITIRWEPFGYNVTRCHSYNLTVHYCYQVGGQEQVREEVSWDTENSHPQHTITNLSPYTNVSVKLILMNPEGRKESQELIVQTDEDLPGAVPTESIQGSTFEEKIFLQWREPTQTYGVITLYEITYKAVSSFDPEIDLSNQSGRVSKLGNETHFLFFGLYPGTTYSFTIRASTAKGFGPPATNQFTTKISAPSMPAYELETPLNQTDNTVTVMLKPAHSRGAPVSVYQIVVEEERPRRTKKTTEILKCYPVPIHFQNASLLNSQYYFAAEFPADSLQAAQPFTIGDNKTYNGYWNTPLLPYKSYRIYFQAASRANGETKIDCVQVATKGAATPKPVPEPEKQTDHTVKIAGVIAGILLFVIIFLGVVLVMKKRKLAKKRKETMSSTRQEMTVMVNSMDKSYAEQGTNCDEAFSFMDTHNLNGRSVSSPSSFTMKTNTLSTSVPNSYYPDETHTMASDTSSLVQSHTYKKREPADVPYQTGQLHPAIRVADLLQHITQMKCAEGYGFKEEYESFFEGQSAPWDSAKKDENRMKNRYGNIIAYDHSRVRLQTIEGDTNSDYINGNYIDGYHRPNHYIATQGPMQETIYDFWRMVWHENTASIIMVTNLVEVGRVKCCKYWPDDTEIYKDIKVTLIETELLAEYVIRTFAVEKRGVHEIREIRQFHFTGWPDHGVPYHATGLLGFVRQVKSKSPPSAGPLVVHCSAGAGRTGCFIVIDIMLDMAEREGVVDIYNCVRELRSRRVNMVQTEEQYVFIHDAILEACLCGDTSVPASQVRSLYYDMNKLDPQTNSSQIKEEFRTLNMVTPTLRVEDCSIALLPRNHEKNRCMDILPPDRCLPFLITIDGESSNYINAALMDSYKQPSAFIVTQHPLPNTVKDFWRLVLDYHCTSVVMLNDVDPAQLCPQYWPENGVHRHGPIQVEFVSADLEEDIISRIFRIYNAARPQDGYRMVQQFQFLGWPMYRDTPVSKRSFLKLIRQVDKWQEEYNGGEGRTVVHCLNGGGRSGTFCAISIVCEMLRHQRTVDVFHAVKTLRNNKPNMVDLLDQYKFCYEVALEYLNSG

SEQ ID NO: 1997 - protein, 917 aa, Homo sapiens
VQRAPVTDFAAAAPAPLPSDAVEPEPHRSRLPRAKPPLTSAPGTAAPKLPLSPWGMPAGLTEPAGAAPPAAVSASGTVTMAPAGALPVRVESTPVALGAVTKAPVSVCVEPTASQPLRSPVGTLVTKVAPVSAPPKVSSGPRLPAPQIVAVKAPNTTTIQFPANLQLPPGTVLIKSNSGPLMLVSPQQTVTRAETTSNITSRPAVPANPQTVKICTVPNSSSQLIKKVAVTPVKKLAQIGTTVVTTVPKPSSVQSVAVPTSVVTVTPGKPLNTVTTLKPSSLGASSTPSNEPNLKAENSAAVQINLSPTMLENVKKCKNFLAMLIKLACSGSQSPEMGQNVKKLVEQLLDAKIEAEEFTRKLYVELKSSPQPHLVPFLKKSVVALRQLLPNSQSFIQQCVQQTSSDMVIATCTTTVTTSPVVTTTVSSSQSEKSIIVSGATAPRTVSVQTLNPLAGPVGAKAGVVTLHSVGPTAATGGTTAGTGLLQTSKPLVTSVANTVTTVSLQPEKPVVSGTAVTLSLPAVTFGETSGAAICLPSVKPVVSSAGTTSDKPVIGTPVQIKLAQPGPVLSQPAGIPQAVQVKQLVVQQPSGGNEKQVTTISHSSTLTIQKCGQKTMPVNTIIPTSQFPPASILKQITLPGNKILSLQASPTQKNRIKENVTSCFRDEDDINDVTSMAGVNLNEENACILATNSELVGTLIQSCKDEPFLFIGALQKRILDIGKKHDITELNSDAVNLISQATQERLRGLLEKLTAIAQHRMTTYKASENYILCSDTRSQLKFLEKLDQLEKQRKDLEEREMLLKAAKSRSNKEDPEQLRLKQKAKELQQLELAQIQHRDANLTALAAIGPRKKRPLESGIEGLKDNLLASGTSSLTATKQLHRPRITRICLRDLIFCMEQEREMKYSRALYLALLK

SEQ ID NO: 1998 - protein, 922 aa, Homo sapiens
VQRAPVTDFAAAAPAPLPSDAVEPEPHRSRLPRAKPPLTSAPGTAAPKLPLSPWGMPAGLTEPAGAAPPAAVSASGTVTMAPAGALPVRVESTPVALGAVTKAPVSVCVEPTASQPLRSPVGTLVTKVAPVSAPPKVSSGPRLPAPQIVAVKAPNTTTIQFPANLQLPPGTVLIKSNSGPLMLVSPQQTVTRAETTSNITSRPAVPANPQTVKICTVPNSSSQLIKKVAVTPVKKLAQIGTTVVTTVPKPSSVQSVAVPTSVVTVTPGKPLNTVTTLKPSSLGASSTPSNEPNLKAENSAAVQINLSPTMLENVKKCKNFLAMLIKLACSGSQSPEMGQNVKKLVEQLLDAKIEAEEFTRKLYVELKSSPQPHLVPFLKKSVVALRQLLPNSQSFIQQCVQQTSSDMVIATCTTTVTTSPVVTTTVSSSQSEKSIIVSGATAPRTVSVQTLNPLAGPVGAKAGVVTLHSVGPTAATGGTTAGTGLLQTSKPLVTSVANTVTTVSLQPEKPVVSGTAVTLSLPAVTFGETSGAAICLPSVKPVVSSAGTTSDKPVIGTPVQIKLAQPGPVLSQPAGIPQAVQVKQLFSLFQVVQQPSGGNEKQVTTISHSSTLTIQKCGQKTMPVNTIIPTSQFPPASILKQITLPGNKILSLQASPTQKNRIKENVTSCFRDEDDINDVTSMAGVNLNEENACILATNSELVGTLIQSCKDEPFLFIGALQKRILDIGKKHDITELNSDAVNLISQATQERLRGLLEKLTAIAQHRMTTYKASENYILCSDTRSQLKFLEKLDQLEKQRKDLEEREMLLKAAKSRSNKEDPEQLRLKQKAKELQQLELAQIQHRDANLTALAAIGPRKKRPLESGIEGLKDNLLASGTSSLTATKQLHRPRITRICLRDLIFCMEQEREMKYSRALYLALLK

SEQ ID NO: 1999 - protein, 302 aa, Homo sapiens
VRCGAPGGAAGTGAPRSCCCQTNPGPPSSLRRAFRRRELPFPACHEIGLGAEAGSGPPPAPAARESRSRAMEEEASSPGLGCSKPHLEKLTLGITRILESSPGVTEVTIIEKPPAERHMISSWEQKNNCVMPEDVKNFYLMTNGFHMTWSVKLDEHIIPLGSMAINSISKLTQLTQSSMYSLPNAPTLADLEDDTHEASDDQPEKPHFDSRSVIFELDSCNGSGKVCLVYKSGKPALAEDTEIWFLDRALYWHFLTDTFTAYYRLLITHLGLPQWQYAFTSYGISPQAKPKGSEGRSKRGCF

SEQ ID NO: 2000 - protein, 200 aa, Homo sapiens
VRCGAPGGAAGTGAPRSCCCQTNPGPPSSLRRAFRRRELPFPACHEIGLGAEAGSGPPPAPAARESRSRAMEEEASSPGLGCSKPHLEKLTLGITRILESSPGVTEVTIIEKPPAERHMISSWEQKNNCVMPEDVKNFYLMTNGFHMTWSVKLDEHIIPLGSMAINSISKLTQLTQSSMYSLPNAPTLADLEDDTHEDNL

SEQ ID NO: 2001 - protein, 145 aa, Homo sapiens
VRCGAPGGAAGTGAPRSCCCQTNPGPPSSLRRAFRRRELPFPACHEIGLGAEAGSGPPPAPAARESRSRAMEEEASSPGLGCSKPHLEKLTLGITRILESSPGVTEVTIIEKPPAERHMISSWEQMKKQRLKEFKEFGRHSGSCL

SEQ ID NO: 2002 - protein, 130 aa, Homo sapiens
VRCGAPGGAAGTGAPRSCCCQTNPGPPSSLRRAFRRRELPFPACHEIGLGAEAGSGPPPAPAARESRSRAMEEEASSPGLGCSKPHLEKLTLGITRILESSPGVTEVTIIEKPPAERHMISSWEQVSVAT

SEQ ID NO: 2003 - protein, 267 aa, Homo sapiens
LSRAMAPRARRRRPLFALLLLCALLARLQVALQIAPPCTSEKHYEHLGRCCNKCEPGKYMSSKCTTTSDSVCLPCGPDEYLDSWNEEDKCLLHKVCDTGKALVAVVAGNSTTPRRCACTAGYHWSQDCECCRRNTECAPGLGAQHPLQLNKDTVCKPCLAGYFSDAFSSTDKCRPWTNCTFLGKRVEHHGTEKSDAVCSSSLPARKPPNEPHVYLPGLIILLLFASVALVAAIIFGVCYRKKGKALTANLWHWINEACGRLSGDKEM

SEQ ID NO: 2004 - protein, 303 aa, Homo sapiens
LSRAMAPRARRRRPLFALLLLCALLARLQVALQIAPPCTSEKHYEHLGRCCNKCEPGKYMSSKCTTTSDSVCLPCGPDEYLDSWNEEDKCLLHKVCDTGKALVAVVAGNSTTPRRCACTAGYHWSQDCECCRRNTECAPGLGAQHPLQLNKDTVCKPCLAGYFSDAFSSTDKCRPWTNCTFLGKRVEHHGTEKSDAVCSSSLPARKPPNGNVTGNSNSTFISSGQVMNFKGDIIVVYVSQTSQEGAAAAAEPMGRPVQEETLARRDSFAGNGPRFPDPCGGPEGLREPEKASRPVQEQGGAKA

SEQ ID NO: 2005 - protein, 341 aa, Homo sapiens
LSRAMAPRARRRRPLFALLLLCALLARLQVALQIAPPCTSEKHYEHLGRCCNKCEPGKYMSSKCTTTSDSVCLPCGPDEYLDSWNEEDKCLLHKVCDTGKALVAVVAGNSTTPRRCACTAGYHWSQDCECCRRNTECAPGLGAQHPLQLNKDTVCKPCLAGYFSDAFSSTDKCRPWTNCTFLGKRVEHHGTEKSDAVCSSSLPARKPPNEPHVYLPGLIILLLFASVALVAAIIFGVCYRKKGKALTGNVTGNSNSTFISSGQVMNFKGDIIVVYVSQTSQEGAAAAAEPMGRPVQEETLARRDSFAGNGPRFPDPCGGPEGLREPEKASRPVQEQGGAKA

SEQ ID NO: 2006 - protein, 620 aa, Homo sapiens
LSRAMAPRARRRRPLFALLLLCALLARLQVALQIAPPCTSEKHYEHLGRCCNKCEPGKYMSSKCTTTSDSVCLPCGPDEYLDSWNEEDKCLLHKVCDTGKALVAVVAGNSTTPRRCACTAGYHWSQDCECCRRNTECAPGLGAQHPLQLNKDTVCKPCLAGYFSDAFSSTDKCRPWTNCTFLGKRVEHHGTEKSDAVCSSSLPARKPPNEPHVYLPGLIILLLFASVALVAAIIFGVCYRKKGKALTANLWHWINEACGRLSGDKESSGDSCVSTHTANFGQQGACEGVLLLTLEEKTFPEDMCYPDQGGVCQGTCVGGGPYAQGEDARMLSLVSKTEIEEDSFRQMPTEDEYMDRPSQPTDQLLFLTEPGSKSTPPFSEPLEVGENDSLSQCFTGTQSTVGSESCNCTEPLCRTDWTPMSSENYLQKEVDSGHCPHWAASPSPNWADVCTGCRNPPGEDCEPLVGSPKRGPLPQCAYGMGLPPEEEASRTEARDQPEDGADGRLPSSARAGAGSGSSPGGQSPASGNVTGNSNSTFISSGQVMNFKGDIIVVYVSQTSQEGAAAAAEPMGRPVQEETLARRDSFAGNGPRFPDPCGGPEGLREPEKASRPVQEQGGAKA

SEQ ID NO: 2007 - protein, 32 aa, Homo sapiens
MAIFFFFCIIVSSLPTAELGTENACSTCLLNE

SEQ ID NO: 2008 - protein, 58 aa, Homo sapiens
LLHQVGLLDLELNRLTKALFLALVALSIVMVTLQGFVGPWYRNLFRFLLLFSYIIPIR

SEQ ID NO: 2009 - protein, 19 aa, Homo sapiens
LLPYTVHFRIFQSVISALL

SEQ ID NO: 2010 - protein, 640 aa, Homo sapiens
LHCPGSPAAPTLQCGRAPSPQGPPPPPTPSARGGGGGGGGGGPGRRAMKLQAVMETLLQRQQRARQELEARQQLPPDPPAAPPGRARAAPDEDREPESARMQRAQMAALAAMRAAAAGLGHPASPGGSEDGPPGSEEEDAAREGTPGSPGRGREGPGEEHFEDMASDEDMKPKWEEEEMEEDLGEDEEEEEEDYEDEEEEEDEEGLGPPGPASLGTTALFPRKAQPPQAFRGDGVPRVLGGQERPGPGPAHPGGAAHVAPQLQPPDHGDWTYEEQFKQLYELDGDPKRKEFLDDLFSFMQKRGTPVNRIPIMAKQVLDLFMLYVLVTEKGGLVEVINKKLWREITKGLNLPTSITSAAFTLRTQYMKYLYPYECEKRGLSNPNELQAAIDSNRREGRRQSFGGSLFAYSPGGAHGMLSSPKLPVSSLGLAASTNGSSITPAPKIKKEEDSAIPITVPGRLPVSLAGHPVVAAQAAAVQAAAAQAAVAAQAAALEQLREKLESAEPPEKKMALVADEQQRLMQRALQQNFLAMAAQLPMSIRINSQASESRQDSAVNLTGTNGSNSISMSVEINGIMYTGVLFAQPPAPTPTSAPNKGGGGGGGSSSNAGGRGGNTGTSGGQAGPAGLSTPSTSTSNNSLP

SEQ ID NO: 2011 - protein, 159 aa, Homo sapiens
VRPRPAARPPAMSSTQFNKGPSYGLSAEVKNRLLSKYDPQKEAELRTWIEGLTGLSIGPDFQKGLKDGTILCTLMNKLQPGSVPKINRSMQNWHQLENLSNFIKAMVSYGMNPVDLFEANDLFESGNMTQVQVSLLALAGKVRPREGQPPAQSHTARWM

SEQ ID NO: 2012 - protein, 341 aa, Homo sapiens
VRPRPAARPPAMSSTQFNKGPSYGLSAEVKNRLLSKYDPQKEAELRTWIEGLTGLSIGPDFQKGLKDGTILCTLMNKLQPGSVPKINRSMQNWHQLENLSNFIKAMVSYGMNPVDLFEANDLFESGNMTQVQVSLLALAGKGLDLGSLAALCWYSRPLSLTQAKTKGLQSGVDIGVKYSEKQERNFDDATMKAGQCVIGLQMGTNKCASQSGMTAYGTRRHLYDPKNHILPPMDHSTISLQMGTNKCASQVGMTAPGTRRHIYDTKLGTDKCDNSSMSLQMGYTQGANQSGQVFGLGRQIYDPKYCPQGTVADGAPSGTGDCPDPGEVPEYPPYYQEEAGY

SEQ ID NO: 2013 - protein, 36 aa, Homo sapiens
LVSATSWIILAKDFAIYFSAFSGRISLLPEGLGRAL

SEQ ID NO: 2014 - protein, 247 aa, Homo sapiens
VAAVAAVGPRQAASVAEVAGRVAGGRREGAAGADPPAMKPPAACAGDMADAASPCSVVNDLRWDLSAQQIEERTRELIEQTKRVYDQVGTQEFEDVSYESTLKALADVEVTYTVQRNILDFPQHVSPSKDIRTASTEADKKLSEFDVEMSMREDVYQRIVWLQEKVQKDSLRPEAARYLERLIKLGRRNGLHLPRETQENIKRIKKKLSLLCIDFNKNLNEDTTFLPFTLQELVAGPPFPPPSSLHT

SEQ ID NO: 2015 - protein, 169 aa, Homo sapiens
LGPAERAKKVEDMMKKLWGDRYFDPANGKFSKSATSPEGKKLPRTFCQLILDPIFKVFDAIMNFKKEETAKLIEKLDIKLDSEDKDKEGKPLLKAVMRRWLPAGDALLQMITIHLPSPVTAQKYRCELLYEGPPDDEAAMGTWSRWPGPEMQPDDFLLPKVVGCRVPEG

SEQ ID NO: 2016 - protein, 237 aa, Homo sapiens
LRAELAAAMTPQLLLALVLWASCPPCSGRKGPPAALTLPRVQCRASRYPIAVDCSWTLPPAPNSTSPVSFIATYRLGMAARGHSWPCLQQTPTSTSCTITDVQLFSMAPYVLNVTAVHPWGSSSSFVPFITEHIIKPDPPEGVRLSPLAERQLQVQWEPPGSWPFPEIFSLKYWIRYKRQGAARFHRVGPIEATSFILRAVRPRARYYVQVAAQDLTDYGELSDWSLPATATMSLGK

SEQ ID NO: 2017 - protein, 1505 aa, Homo sapiens
MAPTWGPGMVSVVGPMGLLVVLLVGGCAAEEPPRFIKEPKDQIGVSGGVASFVCQATGDPKPRVTWNKKGKKVNSQRFETIEFDESAGAVLRIQPLRTPRDENVYECVAQNSVGEITVHAKLTVLREDQLPSGFPNIDMGPQLKVVERTRTATMLCAASGNPDPEITWFKDFLPVDPSASNGRIKQLRSGALQIESSEETDQGKYECVATNSAGVRYSSPANLYVRELREVRRVAPRFSILPMSHEIMPGGNVNITCVAVGSPMPYVKWMQGAEDLTPEDDMPVGRNVLELTDVKDSANYTCVAMSSLGVIEAVAQITVKSLPKAPGTPMVTENTATSITITWDSGNPDPVSYYVIEYKSKSQDGPYQIKEDITTTRYSIGGLSPNSEYEIWVSAVNSIGQGPPSESVVTRTGEQAPASAPRNVQARMLSATTMIVQWEEPVEPNGLIRGYRVYYTMEPEHPVGNWQKHNVDDSLLTTVGSLLEDETYTVRVLAFTSVGDGPLSDPIQVKTQQGVPGQPMNLRAEARSETSITLSWSPPRQESIIKYELLFREGDHGREVGRTFDPTTSYVVEDLKPNTEYAFRLAARSPQGLGAFTPVVRQRTLQSISPKNFKVKMIMKTSVLLSWEFPDNYNSPTPYKIQYNGLTLDVDGRTTKKLITHLKPHTFYNFVLTNRGSSLGGLQQTVTAWTAFNLLNGKPSVAPKPDADGFIMVYLPDGQSPVPVQSYFIVMVPLRKSRGGQFLTPLGSPEDMDLEELIQDISRLQRRSLRHSRQLEVPRPYIAARFSVLPPTFHPGDQKQYGGFDNRGLEPGHRYVLFVLAVLQKSEPTFAASPFSDPFQLDNPDPQPIVDGEEGLIWVIGPVLAVVFIICIVIAILLYKNKPDSKRKDSEPRTKCLLNNADLAPHHPKDPVEMRRINFQTPGMLSHPPIPIADMAEHTERLKANDSLKLSQEYESIDPGQQFTWEHSNLEVNKPKNRYANVIAYDHSRVILQPIEGIMGSDYINANYVDGYRCQNAYIATQGPLPETFGDFWRMVWEQRSATIVMMTRLEEKSRIKCDQYWPNRGTETYGFIQVTLLDTIELATFCVRTFSLHKNGSSEKREVRQFQFTAWPDHGVPEYPTPFLAFLRRVKTCNPPDAGPIVVHCSAGVGRTGCFIVIDAMLERIKPEKTVDVYGHVTLMRSQRNYMVQTEDQYSFIHEALLEAVGCGNTEVPARSLYAYIQKLAQVEPGEHVTGMELEFKRLANSKAHTSRFISANLPCNKFKNRLVNIMPYESTRVCLQPIRGVEGSDYINASFIDGYRQQKAYIATQGPLAETTEDFWRMLWENNSTIVVMLTKLREMGREKCHQYWPAERSARYQYFVVDPMAEYNMPQYILREFKVTDARDGQSRTVRQFQFTDWPEQGVPKSGEGFIDFIGQVHKTKEQFGQDGPISVHCSAGVGRTGVFITLSIVLERMRYEGVVDIFQTVKMLRTQRPAMVQTEDEYQFCYQAALEYLGSFDHYAT

SEQ ID NO: 2018 - protein, 194 aa, Homo sapiens
LRGCWTDGRTQVGGRLSRAVRTLAGNCAAATMSQEGVELEKSVRRLREKFHGKVSSKKAGALMRKFGSDHTGVGRSIVYGVKQKDGQELSNDLDAQDPPEDMKQDRDIQAVATSLLPLTEANLRMFQRAQDDLIPAVDRQFACSSCDHVWWRRVPQRKEVSRCRKCRKRYEPVPADKMWGLAEFHCPKCRHNFR

SEQ ID NO: 2019 - protein, 95 aa, Homo sapiens
LAEAASMGPWGWKLRWTVALLLAAAGTAVGDRCERNEFQCQDGKCISYKWVCDGSAECQDGSDESQETCCESPLGMICIYFCNRDRVSPCWPGWS

SEQ ID NO: 2020 - protein, 122 aa, Homo sapiens
LAEAASMGPWGWKLRWTVALLLAAAGTAVGDRCERNEFQCQDGKCISYKWVCDGSAECQDGSDESQETCLSVTCKSGDFSCGGRVNRCIPQFWRCDGQVDCDNGSDEQGCRKCGPAFAIEPI

SEQ ID NO: 2021 - protein, 866 aa, Homo sapiens
LAEAASMGPWGWKLRWTVALLLAAAGTAVGDRCERNEFQCQDGKCISYKWVCDGSAECQDGSDESQETCLSVTCKSGDFSCGGRVNRCIPQFWRCDGQVDCDNGSDEQGCPPKTCSQDEFRCHDGKCISRQFVCDSDRDCLDGSDEASCPVLTCGPASFQCNSSTCIPQLWACDNDPDCEDGSDEWPQRCRGLYVFQGDSSPCSAFEFHCLSGECIHSSWRCDGGPDCKDKSDEENCAVATCRPDEFQCSDGNCIHGSRQCDREYDCKDMSDEVGCVNVTLCEGPNKFKCHSGECITLDKVCNMARDCRDWSDEPIKECGTNECLDNNGGCSHVCNDLKIGYECLCPDGFQLVAQRRCEDIDECQDPDTCSQLCVNLEGGYKCQCEEGFQLDPHTKACKAVGSIAYLFFTNRHEVRKMTLDRSEYTSLIPNLRNVVALDTEVASNRIYWSDLSQRMICSTQLDRAHGVSSYDTVISRDIQAPDGLAVDWIHSNIYWTDSVLGTVSVADTKGVKRKTLFRENGSKPRAIVVDPVHGFMYWTDWGTPAKIKKGGLNGVDIYSLVTENIQWPNGITLDLLSGRLYWVDSKLHSISSIDVNGGNRKTILEDEKRLAHPFSLAVFEDKVFWTDIINEAIFSANRLTGSDVNLLAENLLSPEDMVLFHNLTQPRGVNWCERTTLSNGGCQYLCLPAPQINPHSPKFTCACPDGMLLARDMRSCLTEAEAAVATQETSTVRLKVSSTAVRTQHTTTRPVPDTSRLPGATPGLTTVEIVTMSHQALGDVAGRGNEKKPSSVRALSIVLPIVLLVFLCLGVFLLWKNWRLKNINSINFDNPVYQKTTEDEVHICHNQDGYSYPSRQMVSLEDDVA

SEQ ID NO: 2022 - protein, 698 aa, Homo sapiens
LAEAASMGPWGWKLRWTVALLLAAAGTAVGDRCERNEFQCQDGKCISYKWVCDGSAECQDGSDESQETCLSVTCKSGDFSCGGRVNRCIPQFWRCDGQVDCDNGSDEQGCLTLCEGPNKFKCHSGECITLDKVCNMARDCRDWSDEPIKECGTNECLDNNGGCSHVCNDLKIGYECLCPDGFQLVAQRRCEDIDECQDPDTCSQLCVNLEGGYKCQCEEGFQLDPHTKACKAVGSIAYLFFTNRHEVRKMTLDRSEYTSLIPNLRNVVALDTEVASNRIYWSDLSQRMICSTQLDRAHGVSSYDTVISRDIQAPDGLAVDWIHSNIYWTDSVLGTVSVADTKGVKRKTLFRENGSKPRAIVVDPVHGFMYWTDWGTPAKIKKGGLNGVDIYSLVTENIQWPNGITLDLLSGRLYWVDSKLHSISSIDVNGGNRKTILEDEKRLAHPFSLAVFEDKVFWTDIINEAIFSANRLTGSDVNLLAENLLSPEDMVLFHNLTQPRGVNWCERTTLSNGGCQYLCLPAPQINPHSPKFTCACPDGMLLARDMRSCLTEAEAAVATQETSTVRLKVSSTAVRTQHTTTRPVPDTSRLPGATPGLTTVEIVTMSHQALGDVAGRGNEKKPSSVRALSIVLPIVLLVFLCLGVFLLWKNWRLKNINSINFDNPVYQKTTEDEVHICHNQDGYSYPSRQMVSLEDDVA

SEQ ID NO: 2023 - protein, 825 aa, Homo sapiens
LAEAASMGPWGWKLRWTVALLLAAAGTAVGDRCERNEFQCQDGKCISYKWVCDGSAECQDGSDESQETCSPKTCSQDEFRCHDGKCISRQFVCDSDRDCLDGSDEASCPVLTCGPASFQCNSSTCIPQLWACDNDPDCEDGSDEWPQRCRGLYVFQGDSSPCSAFEFHCLSGECIHSSWRCDGGPDCKDKSDEENCAVATCRPDEFQCSDGNCIHGSRQCDREYDCKDMSDEVGCVNVTLCEGPNKFKCHSGECITLDKVCNMARDCRDWSDEPIKECGTNECLDNNGGCSHVCNDLKIGYECLCPDGFQLVAQRRCEDIDECQDPDTCSQLCVNLEGGYKCQCEEGFQLDPHTKACKAVGSIAYLFFTNRHEVRKMTLDRSEYTSLIPNLRNVVALDTEVASNRIYWSDLSQRMICSTQLDRAHGVSSYDTVISRDIQAPDGLAVDWIHSNIYWTDSVLGTVSVADTKGVKRKTLFRENGSKPRAIVVDPVHGFMYWTDWGTPAKIKKGGLNGVDIYSLVTENIQWPNGITLDLLSGRLYWVDSKLHSISSIDVNGGNRKTILEDEKRLAHPFSLAVFEDKVFWTDIINEAIFSANRLTGSDVNLLAENLLSPEDMVLFHNLTQPRGVNWCERTTLSNGGCQYLCLPAPQINPHSPKFTCACPDGMLLARDMRSCLTEAEAAVATQETSTVRLKVSSTAVRTQHTTTRPVPDTSRLPGATPGLTTVEIVTMSHQALGDVAGRGNEKKPSSVRALSIVLPIVLLVFLCLGVFLLWKNWRLKNINSINFDNPVYQKTTEDEVHICHNQDGYSYPSRQMVSLEDDVA

SEQ ID NO: 2024 - protein, 688 aa, Homo sapiens
LAEAASMGPWGWKLRWTVALLLAAAGTAVGDRCERNEFQCQDGKCISYKWVCDGSAECQDGSDESQETCLSVTCKSGDFSCGGRVNRCIPQFWRCDGQVDCDNGSDEQGCPVATCRPDEFQCSDGNCIHGSRQCDREYDCKDMSDEVGCVNVTLCEGPNKFKCHSGECITLDKVCNMARDCRDWSDEPIKECGTNECLDNNGGCSHVCNDLKIGYECLCPDGFQLVAQRRCEDIDECQDPDTCSQLCVNLEGGYKCQCEEGFQLDPHTKACKAVGSIAYLFFTNRHEVRKMTLDRSEYTSLIPNLRNVVALDTEVASNRIYWSDLSQRMICSTQLDRAHGVSSYDTVISRDIQAPDGLAVDWIHSNIYWTDSVLGTVSVADTKGVKRKTLFRENGSKPRAIVVDPVHGFMYWTDWGTPAKIKKGGLNGVDIYSLVTENIQWPNGITLDLLSGRLYWVDSKLHSISSIDVNGGNRKTILEDEKRLAHPFSLAVFEDKVFWTDIINEAIFSANRLTGSDVNLLAENLLSPEDMVLFHNLTQPREAEAAVATQETSTVRLKVSSTAVRTQHTTTRPVPDTSRLPGATPGLTTVEIVTMSHQALGDVAGRGNEKKPSSVRALSIVLPIVLLVFLCLGVFLLWKNWRLKNINSINFDNPVYQKTTEDEVHICHNQDGYSYPSRQMVSLEDDVA

SEQ ID NO: 2025 - protein, 864 aa, Homo sapiens
LAEAASMGPWGWKLRWTVALLLAAAGTAVGDRCERNEFQCQDGKCISYKWVCDGSAECQDGSDESQETCLSVTCKSGDFSCGGRVNRCIPQFWRCDGQVDCDNGSDEQGCPPKTCSQDEFRCHDGKCISRQFVCDSDRDCLDGSDEASCPVLTCGPASFQCNSSTCIPQLWACDNDPDCEDGSDEWPQRCRGLYVFQGDSSPCSAFEFHCLSGECIHSSWRCDGGPDCKDKSDEENCAVATCRPDEFQCSDGNCIHGSRQCDREYDCKDMSDEVGCVNVTLCEGPNKFKCHSGECITLDKVCNMARDCRDWSDEPIKECGTNECLDNNGGCSHVCNDLKIGYECLCPDGFQLVAQRRCEDIDECQDPDTCSQLCVNLEGGYKCQCEEGFQLDPHTKACKAVGSIAYLFFTNRHEVRKMTLDRSEYTSLIPNLRNVVALDTEVASNRIYWSDLSQRMICSTQLDRAHGVSSYDTVISRDIQAPDGLAVDWIHSNIYWTDSVLGTVSVADTKGVKRKTLFRENGSKPRAIVVDPVHGFMYWTDWGTPAKIKKGGLNGVDIYSLVTENIQWPNGITLDLLSGRLYWVDSKLHSISSIDVNGGNRKTILEDEKRLAHPFSLAVFEDKVFWTDIINEAIFSANRLTGSDVNLLAENLLSPEDMVLFHNLTQPRGVNWCERTTLSNGGCQYLCLPAPQINPHSPKFTCACPDGMLLARDMRSCLTEAEAAVATQETSTVRLKVSSTAVRTQHTTTRPVPDTSRLPGATPGLTTVEIVTMSHQALGDVAGRGNEKKPSSVRALSIVLPIVLLVFLCLGVFLLWKNWRLKNINSINFDNPVYQKTTEDEVHICHNQDGYSYPSMVSLEDDVA

SEQ ID NO: 2026 - protein, 954 aa, Homo sapiens
LAEAASMGPWGWKLRWTVALLLAAAGTAVGDRCERNEFQCQDGKCISYKWVCDGSAECQDGSDESQETCLSVTCKSGDFSCGGRVNRCIPQFWRCDGQVDCDNGSDEQGCPPKTCSQDEFRCHDGKCISRQFVCDSDRDCLDGSDEASCPVLTCGPASFQCNSSTCIPQLWACDNDPDCEDGSDEWPQRCRGLYVFQGDSSPCSAFEFHCLSGECIHSSWRCDGGPDCKDKSDEENCAVATCRPDEFQCSDGNCIHGSRQCDREYDCKDMSDEVGCVNVTLCEGPNKFKCHSGECITLDKVCNMARDCRDWSDEPIKECGTNECLDNNGGCSHVCNDLKIGYECLCPDGFQLVAQRRCEDIDECQDPDTCSQLCVNLEGGYKCQCEEGFQLDPHTKACKAVGSIAYLFFTNRHEVRKMTLDRSEYTSLIPNLRNVVALDTEVASNRIYWSDLSQRMICSTQLDRAHGVSSYDTVISRDIQAPDGLAVDWIHSNIYWTDSVLGTVSVADTKGVKRKTLFRENGSKPRAIVVDPVHGFMYWTDWGTPAKIKKGGLNGVDIYSLVTENIQWPNGITLDLLSGRLYWVDSKLHSISSIDVNGGNRKTILEDEKRLAHPFSLAVFEDKVFWTDIINEAIFSANRLTGSDVNLLAENLLSPEDMVLFHNLTQPRGVNWCERTTLSNGGCQYLCLPAPQINPHSPKFTCACPDGMLLARDMRSCLTEAEAAVATQETSTVRLKVSSTAVRTQHTTTRPVPDTSRLPGATPGLTTVEIVTMSHQALGDVAGRGNEKKPSSVRALSIVLPIATELGLWSRGQLCDRACLSLQCSSSSFAWGSSFYGRTGGLRTSTASTLTTPSIRRPQRMRSTFATTRTATATPRDRWSVWRMTWREHLPGVPSLPRTLPETSPALFYSKTEKTKALPARALFYIFIHLGGRTGFGQCPCNGLGWDFGFFLSS

SEQ ID NO: 2027 - protein, 552 aa, Homo sapiens
VTRTIHGSPREDTGTPRSREMMFQDSVAFEDVAVSFTQEEWALLDPSQKNLYRDVMQETFKNLTSVGKTWKVQNIEDEYKNPRRNLSLMREKLCESKESHHCGESFNQIADDMLNRKTLPGITPCESSVCGEVGTGHSSLNTHIRADTGHKSSEYQEYGENPYRNKECKKAFSYLDSFQSHDKACTKEKPYDGKECTETFISHSCIQRHRVMHSGDGPYKCKFCGKAFYFLNLCLIHERIHTGVKPYKCKQCGKAFTRSTTLPVHERTHTGVNADECKECGNAFSFPSEIRRHKRSHTGEKPYECKQCGKVFISFSSIQYHKMTHTGEKPYECKQCGKAFRCGSHLQKHGRTHTGEKPYECRQCGKAFRCTSDLQRHEKTHTEDKPYGCKQCGKGFRCASQLQIHERTHSGEKPHECKECGKVFKYFSSLRIHERTHTGEKPHECKQCGKAFRYFSSLHIHERTHTGDKPYECKVCGKAFTCSSSIRYHERTHTGEKPYECKHCGKAFISNYIRYHERTHTGEKPYQCKQCGKAFIRASSCREHERTHTINR

SEQ ID NO: 2028 - protein, 194 aa, Homo sapiens
LPAPPTSLPTQPMEVFVDDETKLTLHGLQQYYVKLKDSEKNRKLFDLLDVLEFNQVIIFVKSVQRCMALAQLLVEQNFPAIAIHRGMAQEERLSRYQQFKDFQRRILVATNLFGRGMDIERVNIVFNYDMPEDSDTYLHRVARAGRFGTKGLAITFVSDENDAKILNDVQDRFEVNVAELPEEIDISTYIEQSR

SEQ ID NO: 2029 - protein, 92 aa, Homo sapiens
LPAPPTSLPTQPMEVFVDDETKLTLHGLQQYYVKLKDSEKNRKLFDLLDVLEFNQVIIFVKSVQRCMALAQLLVEQNFPAIAIHRGMAQEER

SEQ ID NO: 2030 - protein, 360 aa, Homo sapiens
LVGGGAGGRRQRVGGPQEGVMGKDYYQTLGLARGASDEEIKRAYRRQALRYHPDKNKEPGAEEKFKEIAEAYDVLSDPRKREIFDRYGEEGLKGSGPSGGSGGGANGTSFSYTFHGDPHAMFAEFFGGRNPFDTFFGQRNGEEGMDIDDPFSGFPMGMGGFTNVNFGRSRSAQEPARKKQDPPVTHDLRVSLEEIYSGCTKKMKISHKRLNPDGKSIRNEDKILTIEVKKGWKEGTKITFPKEGDQTSNNIPADIVFVLKDKPHNIFKRDGSDVIYPARISLREALCGCTVNVPTLDGRTIPVVFKDVIRPGMRRKVPGEGLPLPKTPEKRGDLIIEFEVIFPERIPQTSRTVLEQVLPI

SEQ ID NO: 2031 - protein, 880 aa, Homo sapiens
LHRQFRGGPWASGCPPPLLYKVLASGQPAQLPSLRRRDSPVPLTLSPAAPAGSSAGTMGGRVFLVFLAFCVWLTLPGAETQDSRGCARWCPQDSSCVNATACRCNPGFSSFSEIITTPMETCDDINECATLSKVSCGKFSDCWNTEGSYDCVCSPGYEPVSGAKTFKNESENTCQDVDECQQNPRLCKSYGTCVNTLGSYTCQCLPGFKLKPEDPKLCTDVNECTSGQNPCHSSTHCLNNVGSYQCRCRPGWQPIPGSPNGPNNTVCEDVDECSSGQHQCDSSTVCFNTVGSYSCRCRPGWKPRHGIPNNQKDTVCEDMTFSTWTPPPGVHSQTLSRFFDKVQDLGRDYKPGLANNTIQSILQALDELLEAPGDLETLPRLQQHCVASHLLDGLEDVLRGLSKNLSNGLLNFSYPAGTELSLEVQKQVDRSVTLRQNQAVMQLDWNQAQKSGDPGPSVVGLVSIPGMGKLLAEAPLVLEPEKQMLLHETHQGLLQDGSPILLSDVISAFLSNNDTQNLSSPVTFTFSHRSVIPRQKVLCVFWEHGQNGCGHWATTGCSTIGTRDTSTICRCTHLSSFAVLMAHYDVQEEDPVLTVITYMGLSVSLLCLLLAALTFLLCKAIQNTSTSLHLQLSLCLFLAHLLFLVAIDQTGHKVLCSIIAGTLHYLYLATLTWMLLEALYLFLTARNLTVVNYSSINRFMKKLMFPVGYGVPAVTVAISAASRPHLYGTPSRCWLQPEKGFIWGFLGPVCAIFSVNLVLFLVTLWILKNRLSSLNSEVSTLRNTRMLAFKATAQLFILGCTWCLGILQVGPAARVMAYLFTIINSLQGVFIFLVYCLLSQQVREQYGKWSKGIRKLKTESEMHTLSSSAKADTSKPSTVN

SEQ ID NO: 2032 - protein, 858 aa, Homo sapiens
LPSLRRRDSPVPLTLSPAAPAGSSAGTMGGRVFLVFLAFCVWLTLPGAETQDSRGCARWCPQDSSCVNATACRCNPGFSSFSEIITTPMETCDDINECATLSKVSCGKFSDCWNTEGSYDCVCSPGYEPVSGAKTFKNESENTCQDVDECQQNPRLCKSYGTCVNTLGSYTCQCLPGFKLKPEDPKLCTDVNECTSGQNPCHSSTHCLNNVGSYQCRCRPGWQPIPGSPNGPNNTVCEDVDECSSGQHQCDSSTVCFNTVGSYSCRCRPGWKPRHGIPNNQKDTVCEDMTFSTWTPPPGVHSQTLSRFFDKVQDLGRDYKPGLANNTIQSILQALDELLEAPGDLETLPRLQQHCVASHLLDGLEDVLRGLSKNLSNGLLNFSYPAGTELSLEVQKQVDRSVTLRQNQAVMQLDWNQAQKSGDPGMGKLLAEAPLVLEPEKQMLLHETHQGLLQDGSPILLSDVISAFLSNNDTQNLSSPVTFTFSHRSVIPRQKVLCVFWEHGQNGCGHWATTGCSTIGTRDTSTICRCTHLSSFAVLMAHYDVQEEDPVLTVITYMGLSVSLLCLLLAALTFLLCKAIQNTSTSLHLQLSLCLFLAHLLFLVAIDQTGHKVLCSIIAGTLHYLYLATLTWMLLEALYLFLTARNLTVVNYSSINRFMKKLMFPVGYGVPAVTVAISAASRPHLYGTPSRCWLQPEKGFIWGFLGPVCAIFSVNLVLFLVTLWILKNRLSSLNSEVSTLRNTRMLAFKATAQLFILGCTWCLGILQVGPAARVMAYLFTIINSLQGVFIFLVYCLLSQQVREQYGKWSKGIRKLKTESEMHTLSSSAKADTSKPSTPGTVVQACNASTLGGQSRKIT

SEQ ID NO: 2033 - protein, 304 aa, Homo sapiens
LPQPPQSPPRTPRPPRQRPAMEAIKKKMQMLKLDKENAIDRAEQAEADKKAAEDKCKQVEEELTHLQKKLKGTEDELDKYSEDLKDAQEKLELTEKKASDAEGDVAALNRRIQLVEEELDRAQERLATALQKLEEAEKAADESERGMKVIENRAMKDEEKMEIQEMQLKEAKHIAEEADRKYEEVARKLVILEGELERAEERAEVSELKCGDLEEELKNVTNNLKSLEAASEKYSEKEDKYEEEIKLLSDKLKEAETRAEFAERTVAKLEKTIDDLEEKLAQAKEENVGLHQTLDQTLNELNCI

SEQ ID NO: 2034 - protein, 325 aa, Homo sapiens
LWPAVPTSGPPPAVLTSAVRPGDLIAPTAAGPGGGERRGRPPRRQRLGGPGRGCAALAGAEPSRASAAARAPLRLRAMAGLNSLEAVKRKIQALQQQADEAEDRAQGLQRELDGERERREKAEGDVAALNRRIQLVEEELDRAQERLATALQKLEEAEKAADESERGMKVIENRAMKDEEKMEIQEMQLKEAKHIAEEADRKYEEVARKLVILEGELERAEERAEVSELKCGDLEEELKNVTNNLKSLEAASEKYSEKEDKYEEEIKLLSDKLKEAETRAEFAERTVAKLEKTIDDLEEKLAQAKEENVGLHQTLDQTLNELNCI

SEQ ID NO: 2035 - protein, 157 aa, Homo sapiens
LRLRAMAGLNSLEAVKRKIQALQQQADEAEDRAQGLQRELDGERERREKAEGDVAALNRRIQLVEEELDRAQERLATALQKLEEAEKAADESERGMKVIENRAMKDEEKMEIQEMQLKEAKHIAEEADRKYEEVARKLVILEGELERAEERAEVSEL

SEQ ID NO: 2036 - protein, 159 aa, Homo sapiens
MLPLSLLKTAQNHPMLVELKNGETYNGHLVSCDNWMNINLREVICTSRVGAAPTNGGGMQGVHTQPPPSLPGPHGRSQWGRPPRTARPSRGQSGGTGQGELGHQVSQCALDFDPVGDFPAVCLLVPPLTWKDLGLGTPCGSGWGSPLQGRPKTPGLCCL

SEQ ID NO: 2037 - protein, 140 aa, Homo sapiens
VRKRFRRRLDANMQIFVKTLTGKTITLEVEPSDTIENVKAKIQDKEGIPPDQQRLIFAGKQLEDGRTLSDYNIQKESTLHLVLRLRGGIIEPSLRQLAQKYNCDKMICRKCYARLHPRAVNCRKKKCGHTNNLRPKKKVK

SEQ ID NO: 2038 - protein, 157 aa, Homo sapiens
VRKRFRRRLGGFRFRYLLFLQRGGRADANMQIFVKTLTGKTITLEVEPSDTIENVKAKIQDKEGIPPDQQRLIFAGKQLEDGRTLSDYNIQKESTLHLVLRLRGGIIEPSLRQLAQKYNCDKMICRKCYARLHPRAVNCRKKKCGHTNNLRPKKKVK

SEQ ID NO: 2039 - protein, 47 aa, Homo sapiens
LVGGGGRADANMQIFVKTLTGKTITLEVEPSDTIENVKAKIQDKEGE

SEQ ID NO: 2040 - protein, 139 aa, Homo sapiens
LVGGGGRADANMQIFVKTLTGKTITLEVEPSDTIENVKAKIQDKEGIPPDQQRLIFAGKQLEDGRTLSDYNIQKESTLHLVLRLRGGIIEPSLRQLAQKYNCDKMICRKCYARLHPRAVNCRKKKCGHTNNLRPKKKVK

SEQ ID NO: 2041 - protein, 173 aa, Homo sapiens
LGRAREATARSPDRGPGGERRFGEEPACSACQRDPTRPRAGRDANMQIFVKTLTGKTITLEVEPSDTIENVKAKIQDKEGIPPDQQRLIFAGKQLEDGRTLSDYNIQKESTLHLVLRLRGGIIEPSLRQLAQKYNCDKMICRKCYARLHPRAVNCRKKKCGHTNNLRPKKKVK

SEQ ID NO: 2042 - protein, 212 aa, Homo sapiens
LSPKLEFSGAVSAHCNLHLPGSSDSSASASRVAGIIGACHHAQLIFVVLVETEFHHVSQAHLELLTSNDPSASAFQSAGITDANMQIFVKTLTGKTITLEVEPSDTIENVKAKIQDKEGIPPDQQRLIFAGKQLEDGRTLSDYNIQKESTLHLVLRLRGGIIEPSLRQLAQKYNCDKMICRKCYARLHPRAVNCRKKKCGHTNNLRPKKKVK

SEQ ID NO: 2043 - protein, 180 aa, Homo sapiens
LRQEGMCVVGDGFPSRLAAGAACADQDLAAVEEGGTAFREDGSSKMMPKDANMQIFVKTLTGKTITLEVEPSDTIENVKAKIQDKEGIPPDQQRLIFAGKQLEDGRTLSDYNIQKESTLHLVLRLRGGIIEPSLRQLAQKYNCDKMICRKCYARLHPRAVNCRKKKCGHTNNLRPKKKVK

SEQ ID NO: 2044 - protein, 88 aa, Homo sapiens
MGPGRCLLTALLLLALAPPPEASQYCGRLEYWNPDNKCCSSCLQRFGPPPCPGENPRPSLAWAELAGDRERGRGEVCGLRAREACLGV

SEQ ID NO: 2045 - protein, 38 aa, Homo sapiens
MGSPAADLRRSVPCVQVLRTTWVPGAFRVLAAAAGVQT

SEQ ID NO: 2046 - protein, 15 aa, Homo sapiens
MIGRRIVVLFSSLAV

SEQ ID NO: 2047 - protein, 8 aa, Homo sapiens
FLRLVLGL

SEQ ID NO: 2048 - protein, 41 aa, Homo sapiens
MRTGLQPSQAPWLLSWMLSVLRFTMRIVFPALAPDPYYSVN

SEQ ID NO: 2049 - protein, 9 aa, Homo sapiens
MAVFALVLV

SEQ ID NO: 2050 - protein, 10 aa, Homo sapiens
MAAWLAFIFC

SEQ ID NO: 2051 - protein, 86 aa, Homo sapiens [sequence omitted]

SEQ ID NO: 2052 - protein, 17 aa, Homo sapiens
RIFTLRKGIPRLIFFLL

SEQ ID NO: 2053 - protein, 23 aa, Homo sapiens
EVGGSPFIWLLILAGISGLSAGP

SEQ ID NO: 2054 - protein, 30 aa, Homo sapiens
ARAAGSWVFFSAICSRRRLLLLPLLLPLPP

SEQ ID NO: 2055 - protein, 26 aa, Homo sapiens
MGGAGPSAVPVKMAAPSRVRCGRLCL

SEQ ID NO: 2056 - protein, 47 aa, Homo sapiens
MHLLLLPVIFLPWVLPQHKHTSATPGFSSEKQFMSETENQTANVKFY

SEQ ID NO: 2057 - protein, 17 aa, Homo sapiens
FCLFSRELRPLVLVIFV

SEQ ID NO: 2058 - protein, 33 aa, Homo sapiens
MLAAGDPRSPDRSRAGQPATMVALRPVQQLQGG

SEQ ID NO: 2059 - protein, 55 aa, Homo sapiens
MFGLFPPKQPIFKTWTLGLAPGHLSLYQDSTSVLPTSSSDSWYPLGWRLLIFLPN

SEQ ID NO: 2060 - protein, 17 aa, Homo sapiens
LFRRMRVKLIIMLGNAW

SEQ ID NO: 2061 - protein, 379 aa, Homo sapiens
IAGVVVLLLLQGGSAYKLVCYFTNWSQDRQEPGKFTPENIDPFLCSHLIYSFASIENNKVIIKDKSEVMLYQTINSLKTKNPKLKILLSIGGYLFGSKGFHPMVDSSTSRLEFINSIILFLRNHNFDGLDVSWIYPDQKENTHFTVLIHELAEAFQKDFTKSTKERLLLTAGVSAGRQMIDNSYQVEKLAKDLDFINLLSFDFHGSWEKPLITGHNSPLSKGWQDRGPSSYYNVEYAVGYWIHKGMPSEKVVMGIPTYGHSFTLASAETTVGAPASGPGAAGPITESSGFLAYYEICQFLKGAKITRLQDQQVPYAVKGNQWVGYDDVKSMETKVQFLKNLNLGGAMIWSIDMDDFTGKSCNQGPYPLVQAVKRSLGSL

SEQ ID NO: 2062 - protein, 133 aa, Homo sapiens
LISVMSGRGKQGGKARAKAKSRSSRAGLQFPVGRVHRLLRKGNYAERVGAGAPVYMAAVLEYLTAEILELAGNAARDNKKTRIIPRHLQLAIRNDEELNKLLGKVTIAQGGVLPNIQAVLLPKKTESHKAKSK

SEQ ID NO: 2063 - protein, 127 aa, Homo sapiens
IMPDPSKSAPAPKKGSKKAVTKAQKKDGKKRKRGRKESYSIYVYKVLKQVHPDTGISSKAMGIMNSFVNDIFERIASEASRLAHYNKRSTITSREVQTAVRLLLPGELAKHAVSEGTKAVTKYTSSK

SEQ ID NO: 2064 - protein, 81 aa, Homo sapiens
LKQVHPDTGISSKTMGIMNSFVNDIFERIAGEASRLAHYNKRSTITSREIQTAVRLLLPGELAKHAVSEGTKAVTKYTSSK

SEQ ID NO: 2065 - protein, 28 aa, Homo sapiens
LGFCLVLSLQKVLPVPPALGTRLCIASP

SEQ ID NO: 2066 - protein, 67 aa, Homo sapiens
LRVSLRRYTRAEYESEAEGVMGGEIQPVSVKVGDKVLLPEYGGTKVVLDDKDYFLFRDGDILGKYVD

SEQ ID NO: 2067 - protein, 7 aa, Homo sapiens
LPIPLKF

SEQ ID NO: 2068 - protein, 305 aa, Homo sapiens
TSPAPAAGSDSVSDPQLGPLVRPRLRAPQPSLRPGPAPTPALPPGPRPGRGRSRLEPPRAPSPPAPPRPLAFLFPARPPGFRAPPATNPLATMSVELEEALPVTTAEGMAKKVTKAGGSAALSPSKKRKNSKKKNQPGKYSQLVVETIRRLGERNGSSLAKIYTEAKKVPWFDQQNGRTYLKYSIKALVQNDTLLQVKGTGANGSFKLNRKKLEGGGERRGAPAAATAPAPTAHKAKKAAPGAAGSRRADKKPARGQKPEQRSHKKGAGAKKDKGGKAKKTAAAGGKKVKKAAKPSVPKVPKGRK

SEQ ID NO: 2069 - protein, 55 aa, Homo sapiens
LFLAMSSHKTFTIKRFLAKKQKQNRPIPQWIQMKPGSKIRYNSKRRHWRRTKLGL

SEQ ID NO: 2070 - protein, 9 aa, Homo sapiens
MRVGLLLSL

SEQ ID NO: 2071 - protein, 23 aa, Homo sapiens
VRRRSRWWDLTVGPISLFSALLA

SEQ ID NO: 2072 - protein, 96 aa, Homo sapiens
LTELAGGGVQSGEPASQAEKLEPGTKRGRTECVCRLELRAEAFGPEAPAVTPRDSAVPSTAESPRLPAKTLFLANFSFSSPPPRPPSSAPPPSLAD

SEQ ID NO: 2073 - protein, 23 aa, Homo sapiens
VIPSCAVVLWSSVLLSPSAFSPT

SEQ ID NO: 2074 - protein, 320 aa, Homo sapiens
LRGCSLEQRSFISVRLLSYLSACRHPMEDSMDMDMSPLRPQNYLFGCELKADKDYHFKVDNDENEHQLSLRTVSLGAGAKDELHIVEAEAMNYEGSPIKVTLATLKMSVQPTVSLGGFEITPPVVLRLKCGSGPVHISGQHLVAVEEDAESEDEEEEDVKLLSISGKRSAPGGGSKVPQKKVKLAADEDDDDDDEEDDDEDDDDDDFDDEEAEEKAPVKKSIRDTPAKNAQKSNQNGKDSKPSSTPRSKGQESFKKQEKTPKTPKGPSSVEDIKAKMQASIEKGGSLPKVEAKFINYVKNCFRMTDQEAIQDLWQWRKSL

SEQ ID NO: 2075 - protein, 557 aa, Homo sapiens
VAHSLSSAAARSRLCPKEETVTDLETAVLYPSHSSFTMPGSLPLNAEACWPKDVGIVALEIYFPSQYVDQAELEKYDGVDAGKYTIGLGQAKMGFCTDREDINSLCMTVVQNLMERNNLSYDCIGRLEVGTETIIDKSKSVKTNLMQLFEESGNTDIEGIDTTNACYGGTAAVFNAVNWIESSSWDGRYALVVAGDIAVYATGNARPTGGVGAVALLIGPNAPLIFERGLRGTHMQHAYDFYKPDMLSEYPIVDGKLSIQCYLSALDRCYSVYCKKIHAQWQKEGNDKDFTLNDFGFMIFHSPYCKLVQKSLARMLLNDFLNDQNRDKNSIYSGLEAFGDVKLEDTYFDRDVEKAFMKASSELFSQKTKASLLVSNQNGNMYTSSVYGSLASVLAQYSPQQLAGKRIGVFSYGSGLAATLYSLKVTQDATPGSALDKITASLCDLKSRLDSRTGVAPDVFAENMKLREDTHHLVNYIPQGSIDSLFEGTWYLVRVDEKHRRTYARRPTPNDDTLDEGVGLVHSNIATEHIPSPAKKVPRLPATAAEPEAAVISNGEH

SEQ ID NO: 2076 - protein, 284 aa, Homo sapiens
KMAVPPTYADLGKSARDVFTKGYGFGLIKLDLKTKSENGLEFTSSGSANTETTKVTGSLETKYRWTEYGLTFTEKWNTDNTLGTEITVEDQLARGLKLTFDSSFSPNTGKKNAKIKTGYKREHINLGCDMDFDIAGPSIRGALVLGYEGWLAGYQMNFETAKSRVTQSNFAVGYKTDEFQLHTNVNDGTEFGGSIYQKVNKKLETAVNLAWTAGNSNTRFGIAAKYQIDPDACFSAKVNNSSLIGLGYTQTLKPGIKLTLSALLDGKNVNAGGHKLGLGLEFQA

SEQ ID NO: 2077 - protein, 330 aa, Homo sapiens
ILVAAATHALAAAMTEQMTLRGTLKGHNGWVTQIATTPQFPDMILSASRDKTIIMWKLTRDETNYGIPQRALRGHSHFVSDVVISSDGQFALSGSWDGTLRLWDLTTGTTTRRFVGHTKDVLSVAFSSDNRQIVSGSRDKTIKLWNTLGVCKYTVQDESHSEWVSCVRFSPNSSNPIIVSCGWDKLVKVWNLANCKLKTNHIGHTGYLNTVTVSPDGSLCASGGKDGQAMLWDLNEGKHLYTLDGGDIINALCFSPNRYWLCAATGPSIKIWDLEGKIIVDELKQEVISTSSKAEPPQCTSLAWSADGQTLFAGYTDNLVRVWQVTIGTR

SEQ ID NO: 2078 - protein, 132 aa, Homo sapiens
ITSAANMPEPAKSAPAPKKGSKKAVTKAQKKDGKKRKRSRKESYSVYVYKVLKQVHPDTGISSKAMGIMNSFVNDIFERIAGEASRLAHYNKRSTITSREIQTAVRLLLPGELAKHAVSEGTKAVTKYTSSK

SEQ ID NO: 2079 - protein, 9 aa, Homo sapiens
RPLVLVIFV

SEQ ID NO: 2080 - protein, 7 aa, Homo sapiens
LVLVIFV

SEQ ID NO: 2081 - protein, 21 aa, Homo sapiens
VGYVDDTQFVRFDSDAATPRM

SEQ ID NO: 2082 - protein, 98 aa, Homo sapiens
KISTSLHFSFLWGAALVLFGPCLLGMEQSIEQTTEILLCLSPVEVASLKEGINFFRNKSTGKDYVLYKNKSRLRACKNMCKHQGGLFIKDIEDLAGSC

SEQ ID NO: 2083 - protein, 217 aa, Homo sapiens
LILNMSETAPAAPAAAPPAEKAPVKKKAAKKAGGTPRKASGPPVSELITKAVAASKERSGVSLAALKKALAAAGYDVEKNNSRIKLGLKSLVSKGTLVQTKGTGASGSFKLNKKAASGEAKPKVKKAGGTKPKKPVGAAKKPKKAAGGATPKKSAKKTPKKAKKPAAATVTKKVAKSPKKAKVAKPKKAAKSAAKAVKPKAAKPKVVKPKKAAPKKK

SEQ ID NO: 2084 - protein, 134 aa, Homo sapiens
LLLLFSDSMPEPAKSAPAPKKGSKKAVTKAQKKDGKKRKRSRKESYSVYVYKVLKQVHPDTGISSKAMGIMNSFVNDIFERIAGEASRLAHYNKRSTITSREIQTAVRLLLPGELAKHAVSEGTKAVTKYTSSK

SEQ ID NO: 2085 - protein, 550 aa, Homo sapiens
TPRRLWALSIVSFSSAGAAMAAVKTLNPKAEVARAQAALAVNISAARGLQDVLRTNLGPKGTMKMLVSGAGDIKLTKDGNVLLHEMQIQHPTASLIAKVATAQDDITGDGTTSNVLIIGELLKQADLYISEGLHPRIITEGFEAAKEKALQFLEEVKVSREMDRETLIDVARTSLRTKVHAELADVLTEAVVDSILAIKKQDEPIDLFMIEIMEMKHKSETDTSLIRGLVLDHGARHPDMKKRVEDAYILTCNVSLEYEKTEVNSGFFYKSAEEREKLVKAERKFIEDRVKKIIELKRKVCGDSDKGFVVINQKGIDPFSLDALSKEGIVALRRAKRRNMERLTLACGGVALNSFDDLSPDCLGHAGLVYEYTLGEEKFTFIEKCNNPRSVTLLIKGPNKHTLTQIKDAVRDGLRAVKNAIDDGCVVPGAGAVEVAMAEALIKHKPSVKGRAQLGVQAFADALLIIPKVLAQNSGFDLQETLVKIQAEHSESGQLVGVDLNTGEPMVAAEVGVWDNYCVKKQLLHSCTVIATNILLVDEIMRAGMSSLKG

SEQ ID NO: 2086 - protein, 337 aa, Homo sapiens
VAFTMEGISNFKTPSKLSEKKKSVLCSTPTINIPASPFMQKLGFGTGVNVYLMKRSPRGLSHSPWAVKKINPICNDHYRSVYQKRLMDEAKILKSLHHPNIVGYRAFTEANDGSLCLAMEYGGEKSLNDLIEERYKASQDPFPAAIILKVALNMARGLKYLHQEKKLLHGDIKSSNVVIKGDFETIKICDVGVSLPLDENMTAPAFITILLVSVTDPEACYIGTEPWKPKEAVEENGVITDKADIFAFGLTLWEMMTLSIPHINLSNDDDDEDKTFDESDFDDEAYYAALGTRPPINMEELDESYQKVIELFSVCTNEDPKDRPSAAHIVEALETDV

SEQ ID NO: 2087 - protein, 446 aa, Homo sapiens
IMREIVHLQAGQCGNQIGAKFWEVISDEHGIDPTGTYHGDSDLQLERINVYYNEATGGKYVPRAVLVDLEPGTMDSVRSGPFGQIFRPDNFVFGQSGAGNNWAKGHYTEGAELVDSVLDVVRKEAESCDCLQGFQLTHSLGGGTGSGMGTLLISKIREEYPDRIMNTFSVVPSPKVSDTVVEPYNATLSVHQLVENTDETYCIDNEALYDICFRTLKLTTPTYGDLNHLVSATMSGVTTCLRFPGQLNADLRKLAVNMVPFPRLHFFMPGFAPLTSRGSQQYRALTVPELTQQMFDAKNMMAACDPRHGRYLTVAAVFRGRMSMKEVDEQMLNVQNKNSSYFVEWIPNNVKTAVCDIPPRGLKMSATFIGNSTAIQELFKRISEQFTAMFRRKAFLHWYTGEGMDEMEFTEAESNMNDLVSEYQQYQDATAEEEGEFEEEAEEEVA

SEQ ID NO: 2088 - protein, 127 aa, Homo sapiens
LFGALDPFPSVLTAARQTPAAKMVKQIESKTAFQEALDAAGDKLVVVDFSATWCGPCKMIKPFFHSLSEKYSNVIFLEVDVDDCQDVASECEVKCMPTFQFFKKGQKVGEFSGANKEKLEATINELV

SEQ ID NO: 2089 - protein, 30 aa, Homo sapiens [sequence omitted]

SEQ ID NO: 2090 - protein, 442 aa, Homo sapiens
LPAPLLARAFARPLLEDRGDSDHSLWLGRETEAAAAQGKRGCSGGSRKMSGEDEQQEQTIAEDLVVTKYKMGGDIANRVLRSLVEASSSGVSVLSLCEKGDAMIMEETGKIFKKEKEMKKGIAFPTSISVNNCVCHFSPLKSDQDYILKEGDLVKIDLGVHVDGFIANVAHTFVVDVAQGTQVTGRKADVIKAAHLCAEAALRLVKPGNQNTQVTEAWNKVAHSFNCTPIEGMLSHQLKQHVIDGEKTIIQNPTDQQKKDHEKAEFEVHEVYAVDVLVSSGEGKAKDAGQRTTIYKRDPSKQYGLKMKTSRAFFSEVERRFDAMPFTLRAFEDEKKARMGVVECAKHELLQPFNVLYEKEGEFVAQFKFTVLLMPNGPMRITSGPFEPDLYKSEMEVQDAELKALLQSSASRKTQKKKKKKASKTAENATSGETLEENEAGD

SEQ ID NO: 2091 - protein, 330 aa, Homo sapiens
IVKVSLHPAVMSKSESPKEPEQLRKLFIGGLSFETTDESLRSHFEQWGTLTDCVVMRDPNTKRSRGFGFVTYATVEEVDAAMNARPHKVDGRVVEPKRAVSREDSQRPGAHLTVKKIFVGGIKEDTEEHHLRDYFEQYGKIEVIEIMTDRGSGKKRGFAFVTFDDHDSVDKIVIQKYHTVNGHNCEVRKALSKQEMASASSSQRGRSGSGNFGGGRGGGFGGNDNFGRGGNFSGRGGFGGSRGGGGYGGSGDGYNGFGNDGSNFGGGGSYNDFGNYNNQSSNFGPMKGGNFGGRSSGPYGGGGQYFAKPRNQGGYGGSSSSSSYGSGRRF

SEQ ID NO: 2092 - protein, 381 aa, Homo sapiens
LSESRGGGGMSEAGEATTTTTTTLPQAPTEAAAAAPQDPAPKSPVGSGAPQAAAPAPAAHVAGNPGGDAAPAATGTAAAASLATAAGSEDAEKKVLATKVLGTVKWFNVRNGYGFINRNDTKEDVFVHQTAIKKNNPRKYLRSVGDGETVEFDVVEGEKGAEAANVTGPDGVPVEGSRYAADRRRYRRGYYGRRRGPPRNYAGEEEEEGSGSSEGFDPPATDRQFSGARNQLRRPQYRPQYRQRRFPPYHVGQTFDRRSRVLPHPNRIQAGEIGEMKDGVPEGAQLQGPVHRNPTYRPRYRSRGPPRPRPAPAVGEAEDKENQQATSGPNQPSVRRGYRRPYNYRRRPRPPNAPSQDGKEAKAGEAPTENPAPPTQQSSAE

SEQ ID NO: 2093 - protein, 88 aa, Homo sapiens
ITLKMKGWGWLALLLGALLGTAWARRSQDLHCGACRALVDELEWEIAQVDPKKTIQMGSFRINPDGSQSVVEVTVTVPPNKVAHSGFG

SEQ ID NO: 2094 - protein, 173 aa, Homo sapiens
IMIIYRDLISHDEMFSDIYKIREIADGLCLEVEGKMVSRTEGNIDDSLIGGNASAEGPEGEGTESTVITGVDIVMNHHLQETSFTKEAYKKYIKDYMKSIKGKLEEQRPERVKPFMTGAAEQIKHILANFKNYQFFIGENMNPDGMVALLDYREDGVTPYMIFFKDGLEMEKC

SEQ ID NO: 2095 - protein, 914 aa, Homo sapiens
LTGRGCLCVLLSVRGTARPRGPEQNAARAESGGRRSRQGAGGRRPRPEAEADREPAMSVVGLDVGSQSCYIAVARAGGIETIANEFSDRCTPSVISFGSKNRTIGVAAKNQQITHANNTVSNFKRFHGRAFNDPFIQKEKENLSYDLVPLKNGGVGIKVMYMGEEHLFSVEQITAMLLTKLKETAENSLKKPVTDCVISVPSFFTDAERRSVLDAAQIVGLNCLRLMNDMTAVALNYGIYKQDLPSLDEKPRIVVFVDMGHSAFQVSACAFNKGKLKVLGTAFDPFLGGKNFDEKLVEHFCAEFKTKYKLDAKSKIRALLRLYQECEKLKKLMSSNSTDLPLNIECFMNDKDVSGKMNRSQFEELCAELLQKIEVPLYSLLEQTHLKVEDVSAVEIVGGATRIPAVKERIAKFFGKDISTTLNADEAVARGCALQCAILSPAFKVREFSVTDAVPFPISLIWNHDSEDTEGVHEVFSRNHAAPFSKVLTFLRRGPFELEAFYSDPQGVPYPEAKIGRFVVQNVSAQKDGEKSRVKVKVRVNTHGIFTISTASMVEKVPTEENEMSSEADMECLNQRPPENPDTDKNVQQDNSEAGTQPQVQTDAQQTSQSPPSPELTSEENKIPDADKANEKKVDQPPEAKKPKIKVVNVELPIEANLVWQLGKDLLNMYIETEGKMIMQDKLEKERNDAKNAVEEYVYEFRDKLCGPYEKFICEQDHQNFLRLLTETEDWLYEEGEDQAKQAYVDKLEELMKIGTPVKVRFQEAEERPKMFEELGQRLQHYAKIAADFRNKDEKYNHIDESEMKKVEKSVNEVMEWMNNVMNAQAKKSLDQDPVVRAQEIKTKIKELNNTCEPVVTQPKPKIESPKLERTPNGPNIDKKEEDLEDKNNFGAEPPHQNGECYPNEKNSVNMDLD

SEQ ID NO: 2096 - protein, 11 aa, Homo sapiens
KMAAVGKERRR

SEQ ID NO: 2097 - protein, 20 aa, Homo sapiens
VMMMMIMTLMIFNRIKIEFF

SEQ ID NO: 2098 - protein, 15 aa, Homo sapiens
LRRARCRALFLVFII

SEQ ID NO: 2099 - protein, 610 aa, Homo sapiens
LQRSFGSMSAAVTAGKLARAPADPGKAGVPGVAAPGAPAAAPPAKEIPEVLVDPRSRRRYVRGRFLGKGGFAKCFEISDADTKEVFAGKIVPKSLLLKPHQREKMSMEISIHRSLAHQHVVGFHGFFEDNDFVFVVLELCRRRSLLELHKRRKALTEPEARYYLRQIVLGCQYLHRNRVIHRDLKLGNLFLNEDLEVKIGDFGLATKVEYDGERKKTLCGTPNYIAPEVLSKKGHSFEVDVWSIGCIMYTLLVGKPPFETSCLKETYLRIKKNEYSIPKHINPVAASLIQKMLQTDPTARPTINELLNDEFFTSGYIPARLPITCLTIPPRFSIAPSSLDPSNRKPLTVLNKGLENPLPERPREKEEPVVRETGEVVDCHLSDMLQQLHSVNASKPSERGLVRQEEAEDPACIPIFWVSKWVDYSDKYGLGYQLCDNSVGVLFNDSTRLILYNDGDSLQYIERDGTESYLTVSSHPNSLMKKITLLKYFRNYMSEHLLKAGANITPREGDELARLPYLRTWFRTRSAIILHLSNGSVQINFFQDHTKLILCPLMAAVTYIDEKRDFRTYRLSLLEEYGCCKELASRLRYARTMVDKLLSSRSASNRLKAS

SEQ ID NO: 2100 - protein, 10 aa, Homo sapiens
LWLCLFSVLL

SEQ ID NO: 2101 - protein, 271 aa, Homo sapiens
LEGTMANCERTFIAIKPDGVQRGLVGEIIKRFEQKGFRLVGLKFMQASEDLLKEHYVDLKDRPFFAGLVKYMHSGPVVAMVWEGLNVVKTGRVMLGETNPADSKPGTIRGDFCIQVGRTMANLERTFIAIKPDGVQRGLVGEIIKRFEQKGFRLVAMKFLRASEEHLKQHYIDLKDRPFFPGLVKYMNSGPVVAMVWEGLNVVKTGRVMLGETNPADSKPGTIRGDFCIQVGRNIIHGSDSVKSAEKEISLWFKPEELVDYKSCAHDWVYE

SEQ ID NO: 2102 - protein, 564 aa, Homo sapiens
VDPLNAVALQPLIPPASPPVEAQARFAAFSLCLITMSTNENANTPAARLHRFKNKGKDSTEMRRRRIEVNVELRKAKKDDQMLKRRNVSSFPDDATSPLQENRNNQGTVNWSVDDIVKGINSSNVENQLQATQAARKLLSREKQPPIDNIIRAGLIPKFVSFLGRTDCSPIQFESAWALTNIASGTSEQTKAVVDGGAIPAFISLLASPHAHISEQAVWALGNIAGDGSVFRDLVIKYGAVDPLLALLAVPDMSSLACGYLRNLTWTLSNLCRNKNPAPPIDAVEQILPTLVRLLHHDDPEVLADTCWAISYLTDGPNERIGMVVKTGVVPQLVKLLGASELPIVTPALRAIGNIVTGTDEQTQVVIDAGALAVFPSLLTNPKTNIQKEATWTMSNITAGRQDQIQQVVNHGLVPFLVSVLSKADFKTQKEAVWAVTNYTSGGTVEQIVYLVHCGIIEPLMNLLTAKDTKIILVILDAISNIFQAAEKLGETEKLSIMIEECGGLDKIEALQNHENESVYKASLSLIEKYFSVEEEEDQNVVPETTSEGYTFQVQDGAPGTFNF

SEQ ID NO: 2103 - protein, 8 aa, Homo sapiens
LGWLALAL

SEQ ID NO: 2104 - protein, 118 aa, Homo sapiens
ITEAGAAKMKFNPFVTSDRSKNRKRHFNAPSHIRRKIMSSPLSKELRQKYNVRSMPIRKDDEVQVVRGHYKGQQIGKVVQVYRKKYVIYIERVQREKANGTTVHVGIHPSKVGVFENA

SEQ ID NO: 2105 - protein, 32 aa, Homo sapiens
LPVSAAIRTPGSSVQPWPYATLWPWASTRATK

SEQ ID NO: 2106 - protein, 18 aa, Homo sapiens
MPKKLRSGLLGCLELVGL

SEQ ID NO: 2107 - protein, 208 aa, Homo sapiens
KRLPKMAEVQVLVLDGRGHLLGRLAAIVAKQVLLGRKVVVVRCEGINISGNFYRNKLKYLAFLRKRMNTNPSRGPYHFRAPSRIFWRTVRGMLPHKTKRGQAALDRLKVFDGIPPPYDKKKRMVVPAALKVVRLKPTRKFAYLGRLAHEVGWKYQAVTATLEEKRKEKAKIHYRKKKQLMRLRKQAEKNVEKKIDKYTEVLKTHGLLV

SEQ ID NO: 2108 - protein, 244 aa, Homo sapiens
LGPASPAAVMNIRNARPEDLMNMQHCNLLCLPENYQMKYYFYHGLSWPQLSYIAEDENGKIVGYVLAKMEEDPDDVPHGHITSLAVKRSHRRLGLAQKLMDQASRAMIENFNAKYVSLHVRKSNRAALHLYSNTLNFQISEVEPKYYADGEDAYAMKRDLTQMADELRRHLELKEKGRHVVLGAIENKVESKGNSPPSSGEACREEKGLAAEDSGGDSKDLSEVSETTESTDVKDSSEASDSAS

SEQ ID NO: 2109 - protein, 315 aa, Homo sapiens [sequence omitted]

SEQ ID NO: 2110 - protein, 598 aa, Homo sapiens
MGLVLALALALALALALSDSRVLWAPAEAHPLSPQGHPARLHRIVPRLRDVFGWGNLTCPICKGLFTAINLGLKEPNVARVGSVAIKLCNLLKIAPPAVCQSIVHLFEDDMVEVWRRSVLSPSEACGLLLGSTCGHWDIFSSWNISLPTVPKPPPKPPSPPAPGAPVSRILFLTDLHWDHDYLEGTDPDCADPLCCRRGSGLPPASRPGAGYWGEYSKCDLPLRTLESLLSGLGPAGPFDMVYWTGDIPAHDVWHQTRQDQLRALTTVTALVRKFLGPVPVYPAVGNHESTPVNSFPPPFIEGNHSSRWLYEAMAKAWEPWLPAEALRTLRIGGFYALSPYPGLRLISLNMNFCSRENFWLLINSTDPAGQLQWLVGELQAAEDRGDKVHIIGHIPPGHCLKSWSWNYYRIVARYENTLAAQFFGHTHVDEFEVFYDEETLSRPLAVAFLAPSATTYIGLNPGYRVYQIDGNYSGSSHVVLDHETYILNLTQANIPGAIPHWQLLYRARETYGLPNTLPTAWHNLVYRMRGDMQLFQTFWFLYHKGHPPSEPCGTPCRLATLCAQLSARADSPALCRHLMPDGSLPEAQSLWPRPLFC

SEQ ID NO: 2111 - protein, 172 aa, Homo sapiens
MPREDRATWKSNYFLKIIQLLDDYPKCFIVGADNVGSKQMQQIRMSLRGKAVVLMGKNTMMRKAIRGHLENNPALEKLLPHIRGNVGFVFTKEDLTEIRDMLLANKVPAAARAGAIAPCEVTVPAQNTGLGPEKTSFFQALGITTKISRGTIEILVSGPGLPVLTRQMGSCF

SEQ ID NO: 2112 - protein, 335 aa, Homo sapiens
MVKVKARVDRFGHVRCLVTRAAFNSAKVDIVAISDPFIDLNYMVYMFQYGSTHGKFHGTVKAENRKLVITGNLITIFQERDPSKIKWGDAGTEYSVESTSIFTIMEKSGAHLQGGAKRVILSAPSANTLMFVMGVTHENYDSSLKIISNASCTMNCLAPLAKVIRDNFGIMEGLMTTVHAVPATQKTVDGPSRRLWCDSHGALQNIIPAPSDAAKAVAKVIPELNGKLTGMAFCVPTANLSVVDLTCCLEKPAKYDDIKKVVKQVSEGPLKGILGYTEYQLVSSDFNSDTHSSTFDAGASIALNDHFFKLISWYDNEFGYSNRVMDLMAHMSSKE

SEQ ID NO: 2113 - protein, 142 aa, Homo sapiens
MACARPLISVYSEKGESSGKNVTLPAVFKAPIRPDIVNFVHTNLRKNNRQPYAVSELAGHQTSAESWGTGRAVARIPRVRGGGTHRSGQGAFGNMCRGGRMFAPTKTWRRWHRRVNTTQKRYAICSALAASALPALVMSKGL

SEQ ID NO: 2114 - protein, 59 aa, Homo sapiens
MESSTFALVPVFAHLSILQSLVPAAGAASPVAISAQHLCYSHVTPGDPGAGAGQGPAPS

SEQ ID NO: 2115 - protein, 177 aa, Homo sapiens
MSKKISGGSVVEMQGDEMTRIIWELIKEKLIFPYVELDLHSYDLGIENRDATNDQVTKDAAEAIKKHNVGVKCATITPDEKRVEEFKLKQMWKSPNGTIRNILGGTVFREAIICKNIPRLVSGWVKPIIIGRHAYGDQVSHVGNNVILHVFFFMAQKFPTCMCFILIFWYLHPLSKV

SEQ ID NO: 2116 - protein, 430 aa, Homo sapiens
MLGLRPPLLALVGLLSLGCVLSQECTKFKVSSCRECIESGPGCTWCQKLNFTGPGDPDSIRCDTRPQLLMRGCAADDIMDPTSLAETQEDHNGGQKQLSPQKVTLYLRPGQAAAFNVTFRRAKGYPIDLYYLMDLSYSMLDDLRNVKKLGGDLLRALNEITESGRIGFGSFVDKTVLPFVNTHPDKLRNPCPNKEKECQPPFAFRHVLKLTNNSNQFQTEVGKQLISGNLDAPEGGLDAMMQVAACPEEIGWRNVTRLLVFATDDGFHFAGDGKLGAILTPNDGRCHLEDNLYKRSNEFDYPSVGQLAHKLAENNIQPIFAVTSRMVKTYEKLTEIIPKSAVGELSEDSSNVVHLIKNAYNVSLPHHSAGTHGVASNLPTAGQLLLQVSRRVVWEESPCPVGQLQPPDLPSGLQDTLARHFHGELWVLSR

SEQ ID NO: 2117 - protein, 31 aa, Homo sapiens
MLGLRPPLLALVGLLSLGCGEFCVPRRGLHA

SEQ ID NO: 2118 - protein, 713 aa, Homo sapiens
MSFVIAACQLVLGLLMTSLTESSIQNSECPQLCVCEIRPWFTPQSTYREATTVDCNDLRLTRIPSNLSSDTQVLLLQSNNIAKTVDELQQLFNLTELDFSQNNFTNIKEVGLANLTQLTTLHLEENQITEMTDYCLQDLSNLQELYINHNQISTISAHAFAGLKNLLRLHLNSNKLKVIDSRWFDSTPNLEILMIGENPVIGILDMNFKPLANLRSLVLAGMYLTDIPGNALVGLDSLESLSFYDNKLVKVPQLALQKVPNLKFLDLNKNPIHKIQEGDFKNMLRLKELGINNMGELVSVDRYALDNLPELTKLEATNNPKLSYIHRLAFRSVPALESLMLNNNALNAIYQKTVESLPNLREISIHSNPLRCDCVIHWINSNKTNIRFMEPLSMFCAMPPEYKGHQVKEVLIQDSSEQCLPMISHDSFPNRLNVDIGTTVFLDCRAMAEPEPEIYWVTPIGNKITVETLSDKYKLSSEGTLEISNIQIEDSGRYTCVAQNVQGADTRVATIKVNGTLLDGTQVLKIYVKQTESHSILVSWKVNSNVMTSNLKWSSATMKIDNPHITYTARVPVDVHEYNLTHLQPSTDYEVCLTVSNIHQQTQKSCVNVTTKNAAFAVDISDQETSTALAAVMGSMFAVISLASIAVYFAKRFKRKNYHHSLKKYMQKTSSIPLNELYPPLINLWEGDSEKDKDGSADTKPTQVDTSRSYYMW

SEQ ID NO: 2119 - protein, 121 aa, Homo sapiens
MFLTSAFLTGFSFHCLYSGIGHGEDILASVEQITIVSRPLSGQRGAGPGNSAYTPRRSQGGPRAATTPGFRFPCRGLVRRAVLRLTVTVQDCILTALLAVSFHSIGVVIMTSSYLLGPVVK

SEQ ID NO: 2120 - protein, 497 aa, Homo sapiens
MAALTTVVVAAAATAVAGAVAGAGAATGTGVGATPAPQQSDGCFSTSGGIRPFHLQNWKQKVNQTKKAEFVRTAEKFKNQVINMEKDKHSHFYNQKSDFRIEHSMLEELENKLIHSRKTERAKIQQQLAKIHNNVKKLQHQLKDVKPTPDFVEKLREMMEEIENAINTFKEEQRLIYEELIKEEKTTNNELSAISRKIDTWALGNSETEKAFRAISSKVPVDKVTPSTLPEEVLDFEKFLQQTGGRQGAWDDYDHQNFVKVRNKHKGKPTFMEEVLEHLPGKTQDEVQQHEKWYQKFLALEERKKESIQIWKTKKQQKREEIFKLKEKADNTPVLFHNKQEDNQKQKEEQRKKQKLAVEAWKKQKSIEMSMKCASQLKEEEEKEKKHQKERQRQFKLKLLLESYTQQKKEQEEFLRLEKEIREKAEKAEKRKNAADEISRFQERVENNVSRDPSRLYKPTKGWEERTKKIGPTGSGPLLHIPHRAIPTWRQGIQRRV

SEQ ID NO: 2121 - protein, 235 aa, Homo sapiens
MEPCASGISQRKGTTTRRFVGHTKDVLSVAFSSDNRQIVSGSRDKTIKLWNTLGVCKYTVQDESHSEWVSCVRFSPNSSNPIIVSCGWDKLVKVWNLANCKLKTNHIGHTGYLNTVTVSPDGSLCASGGKDGQAMLWDLNEGKHLYTLDGGDIINALCFSPNRYWLCAATGPSIKIWDLEGKIIVDELKQEVISTSSKAEPPQCTSLAWSADGQTLFAGYTDNLVRVWQVTIGTR

SEQ ID NO: 2122 - protein, 149 aa, Homo sapiens
MMMGCGESELKSADGEEAAAVPGPPPEPQVPQLRAPVPEPGLDLSLSPRPDSPQPRHGSPGRRKGRAERRGAARQRRQVSGGGWPPARDGLAPTWSLPCPLLPGPLPPDAALPGAVRAAACGAAGAGDARAEEQPGLGPGAAGRSREPL

SEQ ID NO: 2123 - protein, 448 aa, Homo sapiens
MKTLLLFVGLLLTWESGQVLGDQTVSDNELQEMSNQGSKYVNKEIQNAVNGVKQIKTLIEKTNEERKTLLSNLEEAKKKKEDALNETRESETKLKELPGVCNETMMALWEECKPCLKQTCMKFYARVCRSGSGLVGRQLEEFLNQSSPFYFWMNGDRIDSLLENDRQQTHMLDVMQDHFSRASSIIDELFQDRFFTREPQDTYHYLPFSLPHRRPHFFFPKSRIVRSLMPFSPYEPLNFHAMFQPFLEMIHEAQQAMDIHFHSPAFQHPPTEFIREGDDDRTVCREIRHNSTGCLRMKDQCDKCREILSVDCSTNNPSQAKLRRELDESLQVAERLTRKYNELLKSYQWKMLNTSSLLEQLNEQFNWVSRLANLTQGEDQYYLRVTTVASHTSDSDVPSGVTEVVVKLFDSDPITVTVPVEVSRKNPKFMETVAEKALQEYRKKHREE

SEQ ID NO: 2124 - protein, 60 aa, Homo sapiens [sequence omitted]

SEQ ID NO: 2125 - protein, 500 aa, Homo sapiens
MGTWLLACICICTCVCLGVSVTGEGQGPRSRTFTCLTNNILRIDCHWSAPELGQGSSPWLLFTSNQAPGGTHKCILRGSECTVVLPPEAVLVPSDNFTITFHHCMSGREQVSLVDPEYLPRRHVKLDPPSDLQSNISSGHCILTWSISPALEPMTTLLSYELAFKKQEEAWEQAQHRDHIVGVTWLILEAFELDPGFIHEARLRVQMATLEDDVVEEERYTGQWSEWSQPVCFQAPQRQGPLIPPWGWPGNTLVAVSIFLLLTGPTYLLFKLSPRVKRIFYQNVPSPAMFFQPLYSVHNGNFQTWMGAHGAGVLLSQDCAGTPQGALEPCVQEATALLTCGPARPWKSVALEEEQEGPGTRLPGNLSSEDVLPAGCTEWRVQTLAYLPQEDWAPTSLTRPAPPDSEGSRSSSSSSSSNNNNYCALGCYGGWHLSALPGNTQSSGPIPALACGLSCDHQGLETQQGVAWVLAGHCQRPGLHEDLQGMLLPSVLSKARSWTF

SEQ ID NO: 2126 - protein, 112 aa, Homo sapiens
MDCTHPLGNFSFSSQCAFSCSEGTNLTGIEETTCGPFGNWSSPEPTCQVIQCEPLSAPDLGIMNCSHPLASFSFTSACTFICSEGTELIGKKKTICESSGIWSNPSPICQSE

SEQ ID NO: 2127 - protein, 53 aa, Homo sapiens
MRWRTILLQYCFLLITCLLTALEAVPIDIDKTKVQNIHPVESAKIEPPVSEMK

SEQ ID NO: 2128 - protein, 40 aa, Homo sapiens
MGQDPSLCKASVTVMFQVGVHGLCSYRGDLVDNHSMMNTK

SEQ ID NO: 2129 - protein, 196 aa, Homo sapiens
MATLELRTQNVLGEKGRRIRELTAVVQKRFGFPEGSVELYAEKVATRGLCAIAQAESLRYKLLGGLAVRRACYGVLRFIMESGAKGCEVVVSGKLRGQRAKSMKFVDGLMIHSGDPVNYYVDTAVRHVLLRQGVLGIKVKIMLPWDPTGKIGPKKPLPDHVSIVEPKDEILPTTPISEQKGGKPEPPAMPQPVPTA

SEQ ID NO: 2130 - protein, 416 aa, Homo sapiens
MAGAMPLQLLLLLILLGPGNSLQLWDTWADEAEKALGPLLARDRRQATEYEYLDYDFLPETEPPEMLRNSTDTTPLTGPGTPESTTVEPAARRSTGLDAGGAVTELTTELANMGNLSTDSAAMEIQTTQPAATEAQTTQPVPTEAQTTPLAATEAQTTRLTATEAQTTPLAATEAQTTPPAATEAQTTQPTGLEAQTTAPAAMEAQTTAPAAMEAQTTPPAAMEAQTTQTTAMEAQTTAPEATEAQTTQPTATEAQTTPLAAMEALSTEPSATEALSMEPTTKRGLFIPFSVSSVTHKGIPMAASNLSVNYPVGAPDHISVKQCLLAILILALVATIFFVCTVVLAVRLSRKGHMYPVRNYSPTEMVCISSLLPDGGEGPSATANGGLSKAKSPGLTPEPREDREGDDLTLHSFLP

SEQ ID NO: 2131 - protein, 211 aa, Homo sapiens
MPREDRATWKSNYFLKIIQLLDDYPKCFIVGADNVGSKQMQQIRMSLRGKAVVLMGKNTMMRKAIRGHLENNPALEKLLPHIRGNVGFVFTKEDLTEIRDMLLANKVRGQLGWLKRLCCCSLKQNGPFSGCVSGEAFLTVCCLCQVPAAARAGAIAPCEVTVPAQNTGLGPEKTSFFQALGITTKISRGTIEILVSGPGLPVLTRQMGSCF

SEQ ID NO: 2132 - protein, 236 aa, Homo sapiens
MGCGAARALASVLCLRRNAAMAAQGEPQVQFKLVLVGDGGTGKTTFVKRHLTGEFEKKYVATLGVEVHPLVFHTNRGPIKFNVWDTAGQEKFGGLRDGYYIQAQCAIIMFDVTSRVTYKNVPNWHRDLVRVCENIPIVLCGNKVDIKDRKVKAKSIVFHRKKNLQYYDISAKSNYNFEKPFLWLARKLIGDPNLEFVAMPALAPPEVVMDPALAAQYEHDLEVAQTTALPDEDDDL

SEQ ID NO: 2133 - protein, 145 aa, Homo sapiens
MGLGVLLLVFVLGLGLTPPTLAQDNSRYTHFLTQHYDAKPQGRDDRYCESIMRRRGLTSPCKDINTFIHGNKRSIKAICENKNGNPHRENLRISKSSFQVTTCKLHGGSPWPPCQYRATAGFRNVVVACENGLPVHLDQSIFRRP

SEQ ID NO: 2134 - protein, 716 aa, Homo sapiens
MLDHRVRPGPVPHSQEPESEDMELPLEGYVPEGLELAALRPESPAPEEQECHNHSPDGDSSSDYVNNTSEEEDYDEGLPEEEEGITYYIRYCPEDDSYLEGMDCNGEEYLAHSAHPVDTDECQEAVEEWTDSAGPHPHGHEAEGSQDYPDGQLPIPEDEPSVLEAHDQEEDGHYCASKEGYQDYYPEEANGNTGASPYRLRRGDGDLEDQEEDIDQIVAEIKMSLSMTSITSASEASPEHGPEPGPEDSVEACPPIKASCSPSRHEARPKSLNLLPEAKHPGDPQRGFKPKTRTPEERLKWPHEQVCNGLEQPRKQQRSDLNGPVDNNNIPETKKVASFPSFVAVPGPCEPEDLIDGIIFAANYLGSTQLLSERNPSKNIRMMQAQEAVSRVKNSEGDAQTLTEVDLFISTQRIKVLNADTQETMMDHALRTISYIADIGNIVVLMARRRMPRSASQDCIETTPGAQEGKKQYKMICHVFESEDAQLIAQSIGQAFSVAYQEFLRANGINPEDLSQKEYSDIINTQEMYNDDLIHFSNSENCKELQLEKHKGEILGVVVVESGWGSILPTVILANMMNGGPAARSGKLSIGDQIMSINGTSLVGLPLATCQGIIKGLKNQTQVKLNIVSCPPVTTVLIKRPDLKYQLGFSVQNGIVSSPSCSGPPPPLQGPGRGSSSRPMGQAMSGSLVGPGLWLQLPTARPPGAGTFHGSLGGPG

SEQ ID NO: 2135 - protein, 105 aa, Homo sapiens
MERKIHWNSWRASLSLESLFCYSLLLLLPFPTPSQAREICVKFTRGVDFNWQAQALLALQEAAEAFLVHLFEDAYLLTLHAGRVTLFPKDVQLARRIRGLEEGLG

SEQ ID NO: 2136 - protein, 50 aa, Homo sapiens
MAFWIGIGSIVTSMGSSMPPSPSNGSSFSLPTNLTVATVTTLMPLTTFSK

SEQ ID NO: 2137 - protein, 47 aa, Homo sapiens
MSLLLPPLALLLLLAALVAPATAATAYRPDWNRLSGLTRARVETCGG

SEQ ID NO: 2138 - protein, 8 aa, Homo sapiens
MAPVVTGH

SEQ ID NO: 2139 - protein, 706 aa, Homo sapiens
MGKTPPGPGLGPAPEPDQLLLSTLPVSLGFPRAAVAPYWTSPEKMEKKLHAVPAAKTVKFKCPSSGTPNPTLRWLKNGKEFKPDHRIGGYKVRYATWSIIMDSVVPSDKGNYTCIVENEYGSINHTYQLDVVERSPHRPILQAGLPANKTVALGSNVEFMCKVYSDPQPHIQWLKHIEVNGSKIGPDNLPYVQILKTAGVNTTDKEMEVLHLRNVSFEDAGEYTCLAGNSIGLSHHSAWLTVLEALEERPAVMTSPLYLEIIIYCTGAFLISCMVGSVIVYKMKSGTKKSDFHSQMAVHKLAKSIPLRRQVTVSADSSASMNSGVLLVRPSRLSSSGTPMLAGVSEYELPEDPRWELPRDRLVLGKPLGEGCFGQVVLAEAIGLDKDKPNRVTKVAVKMLKSDATEKDLSDLISEMEMMKMIGKHKNIINLLGACTQDGPLYVIVEYASKGNLREYLQARRPPGLEYCYNPSHNPEEQLSSKDLVSCAYQVARGMEYLASKKCIHRDLAARNVLVTEDNVMKIADFGLARDIHHIDYYKKTTNGRLPVKWMAPEALFDRIYTHQSDVWSFGVLLWEIFTLGGSPYPGVPVEELFKLLKEGHRMDKPSNCTNELYMMMRDCWHAVPSQRPTFKQLVEDLDRIVALTSNQEYLDLSMPLDQYSPSFPDTRSSTCSSGEDSVFSHEPLPEEPCLPRHPAQLANGGLKRR

SEQ ID NO: 2140 - protein, 633 aa, Homo sapiens
LKSTRAAENRRDRTWAPRASPASQVGAGRQATSRPAPGMRVLLAALGLLFLGALRAFPQDRPFEDTCHGNPSHYYDKAVRRCCYRCPMGLFPTQQCPQRPTDCRKQCEPDYYLDEADRCTACVTCSRDDLVEKTPCAWNSSRVCECRPGMFCSTSAVNSCARCFFHSVCPAGMIVKFPGTAQKNTVCEPASPGVSPACASPENCKEPSSGTIPQAKPTPVSPATSSASTMPVRGGTRLAQEAASKLTRAPDSPSSVGRPSSDPGLSPTQPCPEGSGDCRKQCEPDYYLDEAGRCTACVSCSRDDLVEKTPCAWNSSRTCECRPGMICATSATNSCARCVPYPICAAETVTKPQDMAEKDTTFEAPPLGTQPDCNPTPENGEAPASTSPTQSLLVDSQASKTLPIPTSAPVALSSTGKPVLDAGPVLFWVILVLVVVVGSSAFLLCHRRACRKRIRQKLHLCYPVQTSQPKLELVDSRPRRSSTQLRSGASVTEPVAEERGLMSQPLMETCHSVGAAYLESLPLQDASPAGGPSSPRDLPEPRVSTEHTNNKIEKIYIMKADTVIVGTVKAELPEGRGLAGPAEPELEEELEADHTPHYPEQETEPPLGSCSDVMLSVEEEGKEDPLPTAASGK

SEQ ID NO: 2141 - protein, 478 aa, Homo sapiens
LEKFHSTSSKRGVHDGGRGKLGEDRKMSPKRIAKRRSPPADAIPKSKKVKDTRAAASRRVPGARSCQGACGPSPPDQKTRPVSHRSHSTEPGLVLTLGQGDVGQLGLGENVMERKKPALVSIPEDVVQAEAGGMHTVCLSKSGQVYSFGCNDEGALGRDTSVEGSEMVPGKVELQEKVVQVSAGDSHTAALTDDGRVFLWGSFRDNNGVIGLLEPMKKSMVPVQVQLDVPVVKVASGNDHLVMLTADGDLYTLGCGEQGQLGRVPELFANRGGRQGLERLLVPKCVMLKSRGSRGHVRFQDAFCGAYFTFAISHEGHVYGFGLSNYHQLGTPGTESCFIPQNLTSFKNSTKSWVGFSGGQHHTVCMDSEGKAYSLGRAEYGRLGLGEGAEEKSIPTLISRLPAVSSVACGASVGYAVTKDGRVFAWGMGTNYQLGTGQDEDAWSPVEMMGKQLENRVVLSVSSGGQHTVLLVKDKEQS

SEQ ID NO: 2142 - protein, 540 aa, Homo sapiens
IPRPTPAMAFANLRKVLISDSLDPCCRKILQDGGLQVVEKQNLSKEELIAELQDCEGLIVRSATKVTADVINAAEKLQVVGRAGTGVDNVDLEAATRKGILVMNTPNGNSLSAAELTCGMIMCLARQIPQATASMKDGKWERKKFMGTELNGKTLGILGLGRIGREVATRMQSFGMKTIGYDPIISPEVSASFGVQQLPLEEIWPLCDFITVHTPLLPSTTGLLNDNTFAQCKKGVRVVNCARGGIVDEGALLRALQSGQCAGAALDVFTEEPPRDRALVDHENVISCPHLGASTKEAQSRCGEEIAVQFVDMVKGKSLTGVVNAQALTSAFSPHTKPWIGLAEALGTLMRAWAGSPKGTIQVITQGTSLKNAGNCLSPAVIVGLLKEASKQADVNLVNAKLLVKEAGLNVTTSHSPAAPGEQGFGECLLAVALAGAPYQAVGLVQGTTPVLQGLNGAVFRPEVPLRRDLPLLLFRTQTSDPAMLPTMIGLLAEAGVRLLSYQTSLVSDGETWHVMGISSLLPSLEAWKQHVTEAFQFHF

SEQ ID NO: 2143 - protein, 164 aa, Homo sapiens
LIVQNTLPVACLLFTMASSDIQVKELEKRASGQAFELILSPRSKESVPEFPLSPPKKKDLSLEEIQKKLEAAEERRKSHEAEVLKQLAEKREHEKEVLQKAIEENNNFSKMAEEKLTHKMEANKENREAQMAAKLERLREKDKHIEEVRKNKESKDPADETEAD

SEQ ID NO: 2144 - protein, 67 aa, Homo sapiens
KKRQQHQEEEDILDVRDEKDGGAREAESRAHTGSSSRGKRKRQQHPKKERAGVSTVQKAKKKQKKRD

SEQ ID NO: 2145 - protein, 45 aa, Homo sapiens
LFSTNRIWSLVLHLLSVARIPPSPLASPLLGSSPVGIHVSSLTPP

SEQ ID NO: 2146 - protein, 402 aa, Homo sapiens
LSWLLALLRCASTMLSLRVPLAPITDPQQLQLSPLKGLSLVDKENTPPALSGTRVLASKTARRIFQEPTEPKTKAAAPGVEDEPLLRENPRRFVIFPIEYHDIWQMYKKAEASFWTAEEVDLSKDIQHWESLKPEERYFISHVLAFFAASDGIVNENLVERFSQEVQITEARCFYGFQIAMENIHSEMYSLLIDTYIKDPKEREFLFNAIETMPCVKKKADWALRWIGDKEATYGERVVAFAAVEGIFFSGSFASIFWLKKRGLMPGLTFSNELISRDEGLHCDFACLMFKHLVHKPSEERVREIIINAVRIEQEFLTEALPVKLIGMNCTLMKQYIEFVADRLMLELGFSKVFRVENPFDFMENISLEGKTNFFEKRVGEYQRMGVMSSPTENSFTLDADF

SEQ ID NO: 2147 - protein, 19 aa, Homo sapiens
IASHLFIFLGIFIALNKKY

SEQ ID NO: 2148 - protein, 831 aa, Homo sapiens
KMVEEENIRVVRCGGSELNFRRAVFSADSKYIFCVSGDFVKVYSTVTEECVHILHGHRNLVTGIQLNPNNHLQLYSCSLDGTIKLWDYIDGILIKTFIVGCKLHALFTLAQAEDSVFVIVNKEKPDIFQLVSVKLPKSSSQEVEAKELSFVLDYINQSPKCIAFGNEGVYVAAVREFYLSVYFFKKKTTSRFTLSSSRNKKHAKNNFTCVACHPTEDCIASGHMDGKIRLWRNFYDDKKYTYTCLHWHHDMVMDLAFSVTGTSLLSGGRESVLVEWRDATEKNKEFLPRLGATIEHISVSPAGDLFCTSHSDNKIIIIHRNLEASAVIQGLVKDRSIFTGLMIDPRTKALVLNGKPGHLQFYSLQSDKQLYNLDIIQQEYINDYGLIQIELTKAAFGCFGNWLATVEQRQEKETELELQMKLWMYNKKTQGFILNTKINMPHEDCITALCFCNAEKSEQPTLVTASKDGYFKVWILTDDSDIYKKAVGWTCDFVGSYHKYQATNCCFSEDGSLLAVSFEEIVTIWDSVTWELKCTFCQRAGKIRHLCFGRLTCSKYLLGATENGILCCWNLLSCALEWNAKLNVRVMEPDPNSENIAAISQSSVGSDLFVFKPSEPRPLYIQKGISREKVQWGVFVPRDVPESFTSEAYQWLNRSQFYFLTKSQSLLTFSTKSPEEKLTPTSKQLLAEESLPTTPFYFILGKHRQQQDEKLNETLENELVQLPLTENIPAISELLHTPAHVLPSAAFLCSMFVNSLLLSKETKSAKEIPEDVDMEEEKESEDSDEENDFTEKVQDTSNTGLGEDIIHQLSKSEEKELRKFRKIDYSWIAAL

SEQ ID NO: 2149 - protein, 41 aa, Homo sapiens
IWGDFIFRSLYKGFLMSITCWMRLCSSPPLSEWSVSINWTP

SEQ ID NO: 2150 - protein, 84 aa, Homo sapiens
LLGTLFTNCLCGTFCFPCLGCQVAADMNECCLCGTSVAMRTLYRTRYGIPGSICDDYMATLCCPHCTLCQIKRDINRRRAMRTF

SEQ ID NO: 2151 - protein, 12 aa, Homo sapiens
VGPISLFSALLA

SEQ ID NO: 2152 - protein, 537 aa, Homo sapiens
VTDLETAVLYPSHSSFTMPGSLPLNAEACWPKDVGIVALEIYFPSQYVDQAELEKYDGVDAGKYTIGLGQAKMGFCTDREDINSLCMTVVQNLMERNNLSYDCIGRLEVGTETIIDKSKSVKTNLMQLFEESGNTDIEGIDTTNACYGGTAAVFNAVNWIESSSWDGRYALVVAGDIAVYATGNARPTGGVGAVALLIGPNAPLIFERGLRGTHMQHAYDFYKPDMLSEYPIVDGKLSIQCYLSALDRCYSVYCKKIHAQWQKEGNDKDFTLNDFGFMIFHSPYCKLVQKSLARMLLNDFLNDQNRDKNSIYSGLEAFGDVKLEDTYFDRDVEKAFMKASSELFSQKTKASLLVSNQNGNMYTSSVYGSLASVLAQYSPQQLAGKRIGVFSYGSGLAATLYSLKVTQDATPGSALDKITASLCDLKSRLDSRTGVAPDVFAENMKLREDTHHLVNYIPQGSIDSLFEGTWYLVRVDEKHRRTYARRPTPNDDTLDEGVGLVHSNIATEHIPSPAKKVPRLPATAAEPEAAVISNGEH

SEQ ID NO: 2153 - protein, 111 aa, Homo sapiens
KSCCLSSIMSGRGKGGKGLGKGGAKRHRKVLRDNIQGITKPAIRRLARRGGVKRISGLIYEETRGVLKVFLENVIRDAVTYTEHAKRKTVTAMDVVYALKRQGRTLYGFGG

SEQ ID NO: 2154 - protein, 34 aa, Homo sapiens
IISLLIILFLPMKPQAHTQRRPQTLNSINKRKTD

SEQ ID NO: 2155 - protein, 97 aa, Homo sapiens
ISTSLHFSFLWGAALVLFGPCLLGMEQSIEQTTEILLCLSPVEVASLKEGINFFRNKSTGKDYVLYKNKSRLRACKNMCKHQGGLFIKDIEDLAGSC

SEQ ID NO: 2156 - protein, 133 aa, Homo sapiens
LLLFSDSMPEPAKSAPAPKKGSKKAVTKAQKKDGKKRKRSRKESYSVYVYKVLKQVHPDTGISSKAMGIMNSFVNDIFERIAGEASRLAHYNKRSTITSREIQTAVRLLLPGELAKHAVSEGTKAVTKYTSSK

SEQ ID NO: 2157 - protein, 326 aa, Homo sapiens
VAFTMEGISNFKTPSKLSEKKKSVLCSTPTINIPASPFMQKLGFGTGVNVYLMKRSPRGLSHSPWAVKKINPICNDHYRSVYQKRLMDEAKILKSLHHPNIVGYRAFTEANDGSLCLAMEYGGEKSLNDLIEERYKASQDPFPAAIILKVALNMARGLKYLHQEKKLLHGDIKSSNVVIKGDFETIKICDVGVSLPLDENMTVTDPEACYIGTEPWKPKEAVEENGVITDKADIFAFGLTLWEMMTLSIPHINLSNDDDDEDKTFDESDFDDEAYYAALGTRPPINMEELDESYQKVIELFSVCTNEDPKDRPSAAHIVEALETDV

SEQ ID NO: 2158 - protein, 312 aa, Homo sapiens
LLCVLGLLLCGAASLELSRPHGDTAKKPIIGILMQKCRNKVMKNYGRYYIAASYVKYLESAGARVVPVRLDLTEKDYEILFKSINGILFPGGSVDLRRSDYAKVAKIFYNLSIQSFDDGDYFPVWGTCLGFEELSLLISGECLLTATDTVDVAMPLNFTGGQLHSRMFQNFPTELLLSLAVEPLTANFHKWSLSVKNFTMNEKLKKFFNVLTTNTDGKIEFISTMEGYKYPVYGVQWHPEKAPYEWKNLDGISHAPNAVKTAFYLAEFFVNEARKNNHHFKSESEEEKALIYQFSPIYTGNISSFQQCYIFD

SEQ ID NO: 2159 - protein, 765 aa, Homo sapiens
IQDISGGRINSILVSPSYRVVEVSYILFELIMNSMKTEENKSFSAMEDDQRTRPEVSKDTVMKQTHADTPVDHCLSGIRKCSSTFKLKSEVNKHETALEMQNPNLNNKECCFTFTLNGNSRKLDRSVFTAYGKPSESIYSALSANDYFSERIKNQFNKNIIVYEEKTIDGHINLGMPLKCLPSDSHFKITFGQRKSSKEDGHILRQCENPNMECILFHVVAIGRTRKKIVKINELHEKGSKLCIYALKGETIEGALCKDGRFRSDIGEFEWKLKEGHKKIYGKQSMVDEVSGKVLEMDISKKKALQQKDIHKKIKQNESATDEINHQSLIQSKKKVHKPKKDGETKDVEHSREQILPPQDLSHYIKDKTRQTIPRIRNYYFCSLPRKYRQINSQVRRRPHLGRRYAINLDVQKEAINLLKNYQTLNEAIMHQYPNFKEEAQWVRKYFREEQKRMNLSPAKQFNIYKKDFGKMTANSVSVATCEQLTYYSKSVGFMQWDNNGNTGNATCFVFNGGYIFTCRHVVHLMVGKNTHPSLWPDIISKCAKVTFTYTEFCPTPDNWFSIEPWLKVSNENLDYAILKLKENGNAFPPGLWRQISPQPSTGLIYLIGHPEGQIKKIDGCTVIPLNERLKKYPNDCQDGLVDLYDTTSNVYCMFTQRSFLSEVWNTHTLSYDTCFSDGSSGSPVFNASGKLVALHTFGLFYQRGFNVHALIEFGYSMDSILCDIKKTNESLYKSLNDEKLETYDEEKGKQESSLQDHQIEPMEC

SEQ ID NO: 2160 - protein, 556 aa, Homo sapiens
TDSIQRGSGPRCAMEQVNELKEKGNKALSVGNIDDALQCYSEAIKLDPHNHVLYSNRSAAYAKKGDYQKAYEDGCKTVDLKPDWGKGYSRKAAALEFLNRFEEAKRTYEEGLKHEANNPQLKEGLQNMEARLAERKFMNPFNMPNLYQKLESDPRTRTLLSDPTYRELIEQLRNKPSDLGTKLQDPRIMTTLSVLLGVDLGSMDEEEEIATPPPPPPPKKETKPEPMEEDLPENKKQALKEKELGNDAYKKKDFDTALKHYDKAKELDPTNMTYITNQAAVYFEKGDYNKCRELCEKAIEVGRENREDYRQIAKAYARIGNSYFKEEKYKDAIHFYNKSLAEHRTPDVLKKCQQAEKILKEQERLAYINPDLALEEKNKGNECFQKGDYPQAMKHYTEAIKRNPKDAKLYSNRAACYTKLLEFQLALKDCEECIQLEPTFIKGYTRKAAALEAMKDYTKAMDVYQKALDLDSSCKEAADGYQRCMMAQYNRHDSPEDVKRRAMADPEVQQIMSDPAMRLILEQMQKDPQALSEHLKNPVIAQKIQKLMDVGLIAIR

SEQ ID NO: 2161 - protein, 50 aa, Homo sapiens
LFAALMSFLTGQLFQKSVDAAPTQQEDSWTSLEHILWPFTRLRHNGPPPV

SEQ ID NO: 2162 - protein, 26 aa, Homo sapiens
MTSLQGAGGHVGCVFGGLPGYKNGCG

SEQ ID NO: 2163 - protein, 409 aa, Homo sapiens
IRPGLPESEPRPPRPPAALTADQPPPRRLSESRGGGGMSEAGEATTTTTTTLPQAPTEAAAAAPQDPAPKSPVGSGAPQAAAPAPAAHVAGNPGGDAAPAATGTAAAASLATAAGSEDAEKKVLATKVLGTVKWFNVRNGYGFINRNDTKEDVFVHQTAIKKNNPRKYLRSVGDGETVEFDVVEGEKGAEAANVTGPDGVPVEGSRYAADRRRYRRGYYGRRRGPPRNYAGEEEEEGSGSSEGFDPPATDRQFSGARNQLRRPQYRPQYRQRRFPPYHVGQTFDRRSRVLPHPNRIQAGEIGEMKDGVPEGAQLQGPVHRNPTYRPRYRSRGPPRPRPAPAVGEAEDKENQQATSGPNQPSVRRGYRRPYNYRRRPRPPNAPSQDGKEAKAGEAPTENPAPPTQQSSAE

SEQ ID NO: 2164 - protein, 84 aa, Homo sapiens
MKGWGWLALLLGALLGTAWARRSQDLHCGACRALVDELEWEIAQVDPKKTIQMGSFRINPDGSQSVVEVTVTVPPNKVAHSGFG

SEQ ID NO: 2165 - protein, 13 aa, Homo sapiens
IYKMAAVGKERRR

SEQ ID NO: 2166 - protein, 32 aa, Homo sapiens
LELSWGSLFAAAAAAATAVLGARSPGKKPSHV

SEQ ID NO: 2167 - protein, 12 aa, Homo sapiens
MQVLPLQIILPT

SEQ ID NO: 2168 - protein, 137 aa, Homo sapiens [sequence omitted]

SEQ ID NO: 2169 - protein, 659 aa, Homo sapiens
TARGAATRSDIAGVCGWLLLSGPCGVGLDLDSRLLGASAMRRSEVLAEESIVCLQKALNHLREIWELIGIPEDQRLQRTEVVKKHIKELLDMMIAEEESLKERLIKSISVCQKELNTLCSELHVEPFQEEGETTILQLEKDLRTQVELMRKQKKERKQELKLLQEQDQELCEILCMPHYDIDSASVPSLEELNQFRQHVTTLRETKASRREEFVSIKRQIILCMEALDHTPDTSFERDVVCEDEDAFCLSLENIATLQKLLRQLEMQKSQNEAVCEGLRTQIRELWDRLQIPEEEREAVATIMSGSKAKVRKALQLEVDRLEELKMQNMKKVIEAIRVELVQYWDQCFYSQEQRQAFAPFCAEDYTESLLQLHDAEIVRLKNYYEVHKELFEGVQKWEETWRLFLEFERKASDPNRFTNRGGNLLKEEKQRAKLQKMLPKLEEELKARIELWEQEHSKAFMVNGQKFMEYVAEQWEMHRLEKERAKQERQLKNKKQTETEMLYGSAPRTPSKRRGLAPNTPGKARKLNTTTMSNATANSSIRPIFGGTVYHSPVSRLPPSGSKPVAASTCSGKKTPRTGRHGANKENLELNGSILSGGYPGSAPLQRNFSINSVASTYSEFAKDPSLSDSSTVGLQRELSKASKSDATSGILNSTNIQS

SEQ ID NO: 2170 - protein, 21 aa, Homo sapiens
MASRVLPFPLILFFRFQTTVL

SEQ ID NO: 2171 - protein, 156 aa, Homo sapiens
LEGTMANCERTFIAIKPDGVQRGLVGEIIKRFEQKGFRLVGLKFMQASEDLLKEHYVDLKDRPFFAGLVKYMHSGPVVAMVWEGLNVVKTGRVMLGETNPADSKPGTIRGDFCIQVGRNIIHGSDSVESAEKEIGLWFHPEELVDYTSCAQNWIYE

SEQ ID NO: 2172 - protein, 254 aa, Homo sapiens
LAMAQLCGLRRSRAFLALLGSLLLSGVLAADRERSIHDFCLVSKVVGRCRASMPRWWYNVTDGSCQLFVYGGCDGNSNNYLTKEECLKKCATVTENATGDLATSRNAADSSVPSAPRRQDSEDHSSDMFNYEEYCTANAVTGPCRASFPRWYFDVERNSCNNFIYGGCRGNKNSYRSEEACMLRCFRQQENPPLPLGSKVVVLAGLFVMVLILFLGASMVYLIRVARRNQERALRTVWSSGDDKEQLVKNTYVL

SEQ ID NO: 2173 - protein, 216 aa, Homo sapiens
LPATIFLLFLLSAVYLGPGCQALWMHKVPASLMVSLGEDAHFQCPHNSSNNANVTWWRVLHGNYTWPPEFLGPGEDPNGTLIIQNVNKSHGGIYVCRVQEGNESYQQSCGTYLRVRQPPPRPFLDMGEGTKNRIITAEGIILLFCAVVPGTLLLFRKRWQNEKLGLDAGDEYEDENLYEGLNLDDCSMYEDISRGLQGTYQDVGSLNIGDVQLEKP

SEQ ID NO: 2174 - protein, 16 aa, Homo sapiens
VLVGVLLLVLILLFSL

SEQ ID NO: 2175 - protein, 191 aa, Homo sapiens
ILSLLLFMVHRLRQRRRERIESLIGANLHHFNLGRRIPGFDYGPDGFGTGLTPLHLSDDGEGGTFHFHDPPPPYTAYKYPDIGQPDDPPPPYEASIHPDSVFYDPADDDAFEPVEVSLPAPGDGGSEGALLRRLEQPLPTAGASLADLEDSADSSSALLVPPDPAQSGSTPAAEALPGGGRHSRSSLNTVV

SEQ ID NO: 2176 - protein, 609 aa, Homo sapiens
VGAGRQATSRPAPGMRVLLAALGLLFLGALRAFPQDRPFEDTCHGNPSHYYDKAVRRCCYRCPMGLFPTQQCPQRPTDCRKQCEPDYYLDEADRCTACVTCSRDDLVEKTPCAWNSSRVCECRPGMFCSTSAVNSCARCFFHSVCPAGMIVKFPGTAQKNTVCEPASPGVSPACASPENCKEPSSGTIPQAKPTPVSPATSSASTMPVRGGTRLAQEAASKLTRAPDSPSSVGRPSSDPGLSPTQPCPEGSGDCRKQCEPDYYLDEAGRCTACVSCSRDDLVEKTPCAWNSSRTCECRPGMICATSATNSCARCVPYPICAAETVTKPQDMAEKDTTFEAPPLGTQPDCNPTPENGEAPASTSPTQSLLVDSQASKTLPIPTSAPVALSSTGKPVLDAGPVLFWVILVLVVVVGSSAFLLCHRRACRKRIRQKLHLCYPVQTSQPKLELVDSRPRRSSTQLRSGASVTEPVAEERGLMSQPLMETCHSVGAAYLESLPLQDASPAGGPSSPRDLPEPRVSTEHTNNKIEKIYIMKADTVIVGTVKAELPEGRGLAGPAEPELEEELEADHTPHYPEQETEPPLGSCSDVMLSVEEEGKEDPLPTAASGK

SEQ ID NO: 2177 - protein, 355 aa, Homo sapiens
KQRSEDSMYTAIPQSGSPFPGSVQDPGLHVWRVEKLKPVPVAQENQGVFFSGDSYLVLHNGPEEVSHLHLWIGQQSSRDEQGACAVLAVHLNTLLGERPVQHREVQGNESDLFMSYFPRGLKYQEGGVESAFHKTSTGAPAAIKKLYQVKGKKNIRATERALNWDSFNTGDCFILDLGQNIFAWCGGKSNILERNKARDLALAIRDSERQGKAQVEIVTDGEEPAEMIQVLGPKPALKEGNPEEDLTADKANAQAAALYKVSDATGQMNLTKVADSSPFALELLISDDCFVLDNGLCGKIYIWKGRKANEKERQAALQVAEGFISRMQYAPNTQVEILPQGHESPIFKQFFKDWK

SEQ ID NO: 2178 - protein, 478 aa, Homo sapiens
VGSMSATAAARKRGKPASGAGAGAGAGKRRRKADSAGDRGKSKGGGKMNEEISSDSESESLAPRKPEEEEEEELEETAQEKKLRLAKLYLEQLRQQEEEKAEARAFEEDQVAGRLKEDVLEQRGRLQKLVAKEIQAPASADIRVLRGHQLSITCLVVTPDDSAIFSAAKDCSIIKWSVESGRKLHVIPRAKKGAEGKPPGHSSHVLCMAISSDGKYLASGDRSKLILIWEAQSCQHLYTFTGHRDAVSGLAFRRGTHQLYSTSHDRSVKVWNVAENSYVETLFGHQDAVAALDALSRECCVTAGGRDGTVRVWKIPEESQLVFYGHQGSIDCIHLINEEHMVSGADDGSVALWGLSKKRPLALQREAHGLRGEPGLEQPFWISSVAALLNTDLVATGSHSSCVRLWQCGEGFRQLDLLCDIPLVGFINSLKFSSSGDFLVAGVGQEHRLGRWWRIKEARNSVCIIPLRRVPVPPAAGS

SEQ ID NO: 2179 - protein, 447 aa, Homo sapiens
ILTMREIVHIQAGQCGNQIGAKFWEVISDEHGIDPTGTYHGDSDLQLDRISVYYNEATGGKYVPRAILVDLEPGTMDSVRSGPFGQIFRPDNFVFGQSGAGNNWAKGHYTEGAELVDSVLDVVRKEAESCDCLQGFQLTHSLGGGTGSGMGTLLISKIREEYPDRIMNTFSVVPSPKVSDTVVEPYNATLSVHQLVENTDETYCIDNEALYDICFRTLKLTTPTYGDLNHLVSATMSGVTTCLRFPGQLNADLRKLAVNMVPFPRLHFFMPGFAPLTSRGSQQYRALTVPELTQQVFDAKNMMAACDPRHGRYLTVAAVFRGRMSMKEVDEQMLNVQNKNSSYFVEWIPNNVKTAVCDIPPRGLKMAVTFIGNSTAIQELFKRISEQFTAMFRRKAFLHWYTGEGMDEMEFTEAESNMNDLVSEYQQYQDATAEEEEDFGEEAEEEA

SEQ ID NO: 2180 - protein, 224 aa, Homo sapiens
LPLVPEFLILNMSETAPAAPAAAPPAEKAPVKKKAAKKAGGTPRKASGPPVSELITKAVAASKERSGVSLAALKKALAAAGYDVEKNNSRIKLGLKSLVSKGTLVQTKGTGASGSFKLNKKAASGEAKPKVKKAGGTKPKKPVGAAKKPKKAAGGATPKKSAKKTPKKAKKPAAATVTKKVAKSPKKAKVAKPKKAAKSAAKAVKPKAAKPKVVKPKKAAPKKK

SEQ ID NO: 2181 - protein, 402 aa, Homo sapiens
LGSVFMILLIIVYWDSAGAAHFYLHTSFSRPHTGPPLPTPGPDRDRELTADSDVDEFLDKFLSAGVKQSDLPRKETEQPPAPGSMEESVRGYDWSPRDARRSPDQGRQQAERRSVLRGFCANSSLAFPTKERAFDDIPNSELSHLIVDDRHGAIYCYVPKVACTNWKRVMIVLSGSLLHRGAPYRDPLRIPREHVHNASAHLTFNKFWRRYGKLSRHLMKVKLKKYTKFLFVRDPFVRLISAFRSKFELENEEFYRKFAVPMLRLYANHTSLPASAREAFRAGLKVSFANFIQYLLDPHTEKLAPFNEHWRQVYRLCHPCQIDYDFVGKLETLDEDAAQLLQLLQVDRQLRFPPSYRNRTASSWEEDWFAKIPLAWRQQLYKLYEADFVLFGYPKPENLLRD

SEQ ID NO: 2182 - protein, 236 aa, Homo sapiens
LGLPSGRGRLTAMPGRAPLRTVPGALGAWLLGGLWAWTLCGLCSLGAVGAPRPCQAPQQWEGRQVMYQQSSGRNSRALLSYDGLNQRVRVLDERKALIPCKRLFEYILLYKDGVMFQIDQATKQCSKMTLTQPWDPLDIPQNSTFEDQYSIGGPQEQITVQEWSDRKSARSYETWIGIYTVKDCYPVQETFTINYSVILSTRFFDIQLGIKDPSVFTPPSTCQMAQLEKMSEDCSW

SEQ ID NO: 2183 - protein, 379 aa, Homo sapiens
LTHRPGRRTMDAPRQVVNFGPGPAKLPHSVLLEIQKELLDYKGVGISVLEMSHRSSDFAKIINNTENLVRELLAVPDNYKVIFLQGGGCGQFSAVPLNLIGLKAGRCADYVVTGAWSAKAAEEAKKFGTINIVHPKLGSYTKIPDPSTWNLNPDASYVYYCANETVHGVEFDFIPDVKGAVLVCDMSSNFLSKPVDVSKFGVIFAGAQKNVGSAGVTVVIVRDDLLGFALRECPSVLEYKVQAGNSSLYNTPPCFSIYVMGLVLEWIKNNGGAAAMEKLSSIKSQTIYEIIDNSQGFYVCPVEPQNRSKMNIPFRIGNAKGDDALEKRFLDKALELNMLSLKGHRSVGGIRASLYNAVTIEDVQKLAAFMKKFLEMHQL

SEQ ID NO: 2184 - protein, 13 aa, Homo sapiens
VAGVVAAMVKFAL

SEQ ID NO: 2185 - protein, 145 aa, Homo sapiens
TLLFLISLAAHLSQWTRGRSRSHPGQGRSGESVEEVPLYGNLHYLQTGRLSQDPEPDQQDPTLGGPARAAEEVMCYTSLQLRPPQGRIPGPGTPVKYSEVVLDSEPKSQASGPEPELYASVCAQTRRARASFPDQAYANSQPAAS

SEQ ID NO: 2186 - protein, 26 aa, Homo sapiens
LMFPGIMLRTAFRVAALFSSLHLGNT

SEQ ID NO: 2187 - protein, 151 aa, Homo sapiens
LPSGRRCRCRRRRRHRARFRPRPPSAVQGPSVSAPGPRLPASPGPGPGTMSEKSVEAAAELSAKDLKEKKEKVEEKASRKERKKEVVEEEENGAEEEEEETAEDGEEEDEGEEEDEEEEEEDDEGPALKRAAEEEDEADPKRQKTENGASA

SEQ ID NO: 2188 - protein, 394 aa, Homo sapiens
LLLSARGRRRRSIVKVSLHPAVMSKSESPKEPEQLRKLFIGGLSFETTDESLRSHFEQWGTLTDCVVMRDPNTKRSRGFGFVTYATVEEVDAAMNARPHKVDGRVVEPKRAVSREDSQRPGAHLTVKKIFVGGIKEDTEEHHLRDYFEQYGKIEVIEIMTDRGSGKKRGFAFVTFDDHDSVDKIVIQKYHTVNGHNCEVRKALSKQEMASASSSQRGRSGSGNFGGGRGGGFGGNDNFGRGGNFSGRGGFGGSRGGGGYGGSGDGYNGFGNDGGYGGGGPGYSGGSRGYGSGGQGYGNQGSGYGGSGSYDSYNNGGGGGFGGGSGSNFGGGGSYNDFGNYNNQSSNFGPMKGGNFGGRSSGPYGGGGQYFAKPRNQGGYGGSSSSSSYGSGRRF

SEQ ID NO: 2189 - protein, 17 aa, Homo sapiens
VGVTVFFSFLVFGMYGR

SEQ ID NO: 2190 - protein, 137 aa, Homo sapiens
LWSLGVILYILLSGYPPFVGRCGSDCGWDRGEACPACQNMLFESIQEGKYEFPDKDWAHISCAAKDLISKLLVRDAKQRLSAAQVLQHPWVQGCAPENTLPTPMVLQRWDSHFLLPPHPCRIHVRPGGLVRTVTVNE

SEQ ID NO: 2191 - protein, 24 aa, Homo sapiens
LVFIFVVIFFTFLSSIPALTATLR

SEQ ID NO: 2192 - protein, 14 aa, Homo sapiens
MDFWLWPLYFLPGV

SEQ ID NO: 2193 - protein, 26 aa, Homo sapiens
MWGSTWMSTTPRTRGRMKSTSAAMEL

SEQ ID NO: 2194 - protein, 193 aa, Homo sapiens
MERPLTLTRGSSWAHCSYCHRGATGPWPLTFQVAPGYVVTVLTWPGTNPTLSSILLNSHTDVVPVFKEHWSHDPFEAFKDSEGYIYARGAQDMKCVSIQYLEAVRRLKVEGHRFPRTIHMTFVPDEEVGGHQGMELFVQRPEFHALRAGFALDEGEQVGKPMSSQAGSRRLLVGTELLHPLNPLSLLRHSQSH

SEQ ID NO: 2195 - protein, 300 aa, Homo sapiens
MWSWKCLLFWAVLVTATLCTARPSPTLPEQDALPSSEDDDDDDDSSSEEKETDNTKPNPVAPYWTSPEKMEKKLHAVPAAKTVKFKCPSSGTPNPTLRWLKNGKEFKPDHRIGGYKVRYATWSIIMDSVVPSDKGNYTCIVENEYGSINHTYQLDVVERSPHRPILQAGLPANKTVALGSNVEFMCKVYSDPQPHIQWLKHIEVNGSKIGPDNLPYVQILKVIMAPVFVGQSTGKETTVSGAQVPVGRLSCPRMGSFLTLQAHTLHLSRDLATSPRTSNRGHKVEVSWEQRAAGMGGAGL

SEQ ID NO: 2196 - protein, 136 aa, Homo sapiens
MATNFLAHEKIWFDKFKYDDAERRFYEQMNGPVAGASRQENGASVILRDIARARENIQKSLAGSSGPGASSGTSGDHGELVVRIASLEVENQSLRGGEAPGQWVGAVPGPCHLTVLPLPPQWYRSCSRPSPSWRPG

SEQ ID NO: 2197 - protein, 735 aa, Homo sapiens
MVVILGASNILWIMFAASQAFKIETTPESRYLAQIGDSVSLTCSTTGCESPFFSWRTQIDSPLNGKVTNEGTTSTLTMNPVSFGNEHSYLCTATCESRKLEKGIQVEIYSFPKDPEIHLSGPLEAGKPITVKCSVADVYPFDRLEIDLLKGDHLMKSQEFLEDADRKSLETKSLEVTFTPVIEDIGKVLVCRAKLHIDEMDSVPTVRQAVKELQVYISPKNTVISVNPSTKLQEGGSVTMTCSSEGLPAPEIFWSKKLDNGNLQHLSGNATLTLIAMRMEDSGIYVCEGVNLIGKNRKEVELIVQEKPFTVEISPGPRIAAQIGDSVMLTCSVMGCESPSFSWRTQIDSPLSGKVRSEGTNSTLTLSPVSFENEHSYLCTVTCGHKKLEKGIQVELYSFPRDPEIEMSGGLVNGSSVTVSCKVPSVYPLDRLEIELLKGETILENIEFLEDTDMKSLENKSLEMTFIPTIEDTGKALVCQAKLHIDDMEFEPKQRQSTQTLYVNVAPRDTTVLVSPSSILEEGSSVNMTCLSQGFPAPKILWSRQLPNGELQPLSENATLTLISTKMEDSGVYLCEGINQAGRSRKEVELIIQVTPKDIKLTAFPSESVKEGDTVIISCTCGNVPETWIILKKKAETGDTVLKSIDGAYTIRKAQLKDAGVYECESKNKVGSQLRSLTLDVQGRENNKDYFSPELLVLYFASSLIIPAIGMIIYFARKANMKGSYSLVEAQKSKV

SEQ ID NO: 2198 - protein, 385 aa, Homo sapiens
MDQKSLWAGVVVLLLLQGGSAYKLVCYFTNWSQDRQEPGKFTPENIDPFLCSHLIYSFASIENNKVIIKDKSEVMLYQTINSLKTKNPKLKILLSIGGYLFGSKGFHPMVDSSTSRLEFINSIILFLRNHNFDGLDVSWIYPDQKENTHFTVLIHELAEAFQKDFTKSTKERLLLTAGVSAGRQMIDNSYQVEKLAKDLDFINLLSFDFHGSWEKPLITGHNSPLSKGWQDRGPSSYYNVEYAVGYWIHKGMPSEKVVMGIPTYGHSFTLASAETTVGAPASGPGAAGPITESSGFLAYYEICQFLKGAKITRLQDQQVPYAVKGNQWVGYDDVKSMETKVQFLKNLNLGGAMIWSIDMDDFTGKSCNQGPYPLVQAVKRSLGSL

SEQ ID NO: 2199 - protein, 1289 aa, Homo sapiens
MRGAGAAGLLALLLLLLLLLLGLGGRVEGGPAGERGAGGGGALARERFKVVFAPVICKRTCLKGQCRDSCQQGSNMTLIGENGHSTDTLTGSGFRVVVCPLPCMNGGQCSSRNQCLCPPDFTGRFCQVPAGGAGGGTGGSGPGLSRTGALSTGALPPLAPEGDSVASKHAIYAVQVIADPPGPGEGPPAQHAAFLVPLGPGQISAEVQAPPPVVNVRVHHPPEASVQVHRIESSNAESAAPSQHLLPHPKPSHPRPPTQKPLGRCFQDTLPKQPCGSNPLPGLTKQEDCCGSIGTAWGQSKCHKCPQLQYTGVQKPGPVRGEVGADCPQGYKRLNSTHCQDINECAMPGVCRHGDCLNNPGSYRCVCPPGHSLGPSRTQCIADKPEEKSLCFRLVSPEHQCQHPLTTRLTRQLCCCSVGKAWGARCQRCPTDGTAAFKEICPAGKGYHILTSHQTLTIQGESDFSLFLHPDGPPKPQQLPESPSQAPPPEDTEEERGVTTDSPVSEERSVQQSHPTATTTPARPYPELISRPSPPTMRWFLPDLPPSRSAVEIAPTQVTETDECRLNQNICGHGECVPGPPDYSCHCNPGYRSHPQHRYCVDVNECEAEPCGPGRGICMNTGGSYNCHCNRGYRLHVGAGGRSCVDLNECAKPHLCGDGGFCINFPGHYKCNCYPGYRLKASRPPVCEDIDECRDPSSCPDGKCENKPGSFKCIACQPGYRSQGGGACRDVNECAEGSPCSPGWCENLPGSFRCTCAQGYAPAPDGRSCLDVDECEAGDVCDNGICSNTPGSFQCQCLSGYHLSRDRSHCEDIDECDFPAACIGGDCINTNGSYRCLCPQGHRLVGGRKCQDIDECSQDPSLCLPHGACKNLQGSYVCVCDEGFTPTQDQHGCEEVEQPHHKKECYLNFDDTVFCDSVLATNVTQQECCCSLGAGWGDHCEIYPCPVYSSAEFHSLCPDGKGYTQDNNIVNYGIPAHRDIDECMLFGSEICKEGKCVNTQPGYECYCKQGFYYDGNLLECVDVDECLDESNCRNGVCENTRGGYRCACTPPAEYSPAQRQCLSPEEMDVDECQDPAACRPGRCVNLPGSYRCECRPPWVPGPSGRDCQLPESPAERAPERRDVCWSQRGEDGMCAGPLAGPALTFDDCCCRQGRGWGAQCRPCPPRGAGSHCPTSQSESNSFWDTSPLLLGKPPRDEDSSEEDSDECRCVSGRCVPRPGGAVCECPGGFQLDASRARCVDIDECRELNQRGLLCKSERCVNTSGSFRCVCKAGFARSRPHGACVPQRRR

SEQ ID NO: 2200 - protein, 1242 aa, Homo sapiens
MRGAGAAGLLALLLLLLLLLLGLGGRVEGGPAGERGAGGGGALARERFKVVFAPVICKRTCLKGQCRDSCQQGSNMTLIGENGHSTDTLTGSGFRVVVCPLPCMNGGQCSSRNQCLCPPDFTGRFCQVPAGGAGGGTGGSGPGLSRTGALSTGALPPLAPEGDSVASKHAIYAVQVIADPPGPGEGPPAQHAAFLVPLGPGQISAEVQAPPPVVNVRVHHPPEASVQVHRIESSNAESAAPSQHLLPHPKPSHPRPPTQKPLGRCFQDTLPKQPCGSNPLPGLTKQEDCCGSIGTAWGQSKCHKCPQLQYTGVQKPGPVRGEVGADCPQGYKRLNSTHCQDINECAMPGVCRHGDCLNNPGSYRCVCPPGHSLGPSRTQCIADKPEEKSLCFRLVSPEHQCQHPLTTRLTRQLCCCSVGKAWGARCQRCPTDGTAAFKEICPAGKGYHILTSHQTLTIQGESDFSLFLHPDGPPKPQQLPESPSQAPPPEDTEEERGVTTDSPVSEERSVQQSHPTATTTPARPYPELISRPSPPTMRWFLPDLPPSRSAVEIAPTQVTETDECRLNQNICGHGECVPGPPDYSCHCNPGYRSHPQHRYCVDVNECEAEPCGPGRGICMNTGGSYNCHCNRGYRLHVGAGGRSCVDLNECAKPHLCGDGGFCINFPGHYKCNCYPGYRLKASRPPVCEDIDECRDPSSCPDGKCENKPGSFKCIACQPGYRSQGGGACRDVNECAEGSPCSPGWCENLPGSFRCTCAQGYAPAPDGRSCLDVDECEAGDVCDNGICSNTPGSFQCQCLSGYHLSRDRSHCEDIDECDFPAACIGGDCINTNGSYRCLCPQGHRLVGGRKCQDIDECSQDPSLCLPHGACKNLQGSYVCVCDEGFTPTQDQHGCEEVEQPHHKKECYLNFDDTVFCDSVLATNVTQQECCCSLGAGWGDHCEIYPCPVYSSAEFHSLCPDGKGYTQDNNIVNYGIPAHRDIDECMLFGSEICKEGKCVNTQPGYECYCKQGFYYDGNLLECVDVDECLDESNCRNGVCENTRGGYRCACTPPAEYSPAQRQCLSPEEMERAPERRDVCWSQRGEDGMCAGPLAGPALTFDDCCCRQGRGWGAQCRPCPPRGAGSHCPTSQSESNSFWDTSPLLLGKPPRDEDSSEEDSDECRCVSGRCVPRPGGAVCECPGGFQLDASRARCVDIDECRELNQRGLLCKSERCVNTSGSFRCVCKAGFARSRPHGACVPQRRR

SEQ ID NO: 2201 - protein, 464 aa, Homo sapiens [sequence omitted]

SEQ ID NO: 2202 - protein, 695 aa, Homo sapiens
MELPLEGYVPEGLELAALRPESPAPEEQECHNHSPDGDSSSDYVNNTSEEEDYDEGLPEEEEGITYYIRYCPEDDSYLEGMDCNGEEYLAHSAHPVDTDECQEAVEEWTDSAGPHPHGHEAEGSQDYPDGQLPIPEDEPSVLEAHDQEEDGHYCASKEGYQDYYPEEANGNTGASPYRLRRGDGDLEDQEEDIDQIVAEIKMSLSMTSITSASEASPEHGPEPGPEDSVEACPPIKASCSPSRHEARPKSLNLLPEAKHPGDPQRGFKPKTRTPEERLKWPHEQVCNGLEQPRKQQRSDLNGPVDNNNIPETKKVASFPSFVAVPGPCEPEDLIDGIIFAANYLGSTQLLSERNPSKNIRMMQAQEAVSRVKNSEGDAQTLTEVDLFISTQRIKVLNADTQETMMDHALRTISYIADIGNIVVLMARRRMPRSASQDCIETTPGAQEGKKQYKMICHVFESEDAQLIAQSIGQAFSVAYQEFLRANGINPEDLSQKEYSDIINTQEMYNDDLIHFSNSENCKELQLEKHKGEILGVVVVESGWGSILPTVILANMMNGGPAARSGKLSIGDQIMSINGTSLVGLPLATCQGIIKGLKNQTQVKLNIVSCPPVTTVLIKRPDLKYQLGFSVQNGIVSSPSCSGPPPPLQGPGRGSSSRPMGQAMSGSLVGPGLWLQLPTARPPGAGTFHGSLGGPG

SEQ ID NO: 2203 - protein, 427 aa, Homo sapiens
MFFSMGFIVAVKGKIASPLEAPVFVAAPHSTFFDGIACVVAGLPSMVSRNENAQVPLIGRLLRAVQPVLVSRVDPDSRKNTINEIIKRTTSGGEWPQILVFPEGTCTNRSCLITFKPGAFIPGVPVQPVLLRYPNKLDTVTWTWQGYTFIQLCMLTFCQLFTKVEVEFMPVQVPNDEEKNDPVLFANKVRNLMAEALGIPVTDHTYEDCRLMISAGQLTLPMEAGLVEFTKISRKLKLDWDGVRKHLDEYASIASSSKGGRIGIEEFAKYLKLPVSDVLRQLFALFDRNHDGSIDFREYVIGLAVLCNPSNTEEIIQVAFKLFDVDEDGYITEEEFSTILQASLGVPDLDVSGLFKEIAQGDSISYEEFKSFALKHPEYAKIFTTYLDLQTCHVFSLPKEVQTTPSTASNKVSPEKHEESTSDKKDD

SEQ ID NO: 2204 - protein, 1212 aa, Homo sapiens
MALMFTGHLLFLALLMFAFSTFEESVSNYSEWAVFTDDIDQFKTQKVQDFRPNQKLKKSMLHPSLYFDAGEIQAMRQKSRASHLHLFRAIRSAVTVMLSNPTYYLPPPKHADFAAKWNEIYGNNLPPLALYCLLCPEDKVAFEFVLEYMDRMVGYKDWLVENAPGDEVPIGHSLTGFATAFDFLYNLLDNHRRQKYLEKIWVITEEMYEYSKVRSWGKQLLHNHQATNMIALLTGALVTGVDKGSKANIWKQAVVDVMEKTMFLLNHIVDGSLDEGVAYGSYTAKSVTQYVFLAQRHFNINNLDNNWLKMHFWFYYATLLPGFQRTVGIADSNYNWFYGPESQLVFLDKFILKNGAGNWLAQQIRKHRPKDGPMVPSTAQRWSTLHTEYIWYDPQLTPQPPADYGTAKIHTFPNWGVVTYGAGLPNTQTNTFVSFKSGKLGGRAVYDIVHFQPYSWIDGWRSFNPGHEHPDQNSFTFAPNGQVFVSEALYGPKLSHLNNVLVFAPSPSSQCNKPWEGQLGECAQWLKWTGEEVGDAAGEIITASQHGEMVFVSGEAVSAYSSAMRLKSVYRALLLLNSQTLLVVDHIERQEDSPINSVSAFFHNLDIDFKYIPYKFMNRYNGAMMDVWDAHYKMFWFDHHGNSPMASIQEAEQAAEFKKRWTQFVNVTFQMEPTITRIAYVFYGPYINVSSCRFIDSSNPGLQISLNVNNTEHVVSIVTDYHNLKTRFNYLGFGGFASVADQGQITRFGLGTQAIVKPVRHDRIIFPFGFKFNIAVGLILCISLVILTFQWRFYLSFRKLMRWILILVIALWFIELLDVWSTCSQPICAKWTRTEAEGSKKSLSSEGHHMDLPDVVITSLPGSGAEILKQLFFNSSDFLYIRVPTAYIDIPETELEIDSFVDACEWKVSDIRSGHFRLLRGWLQSLVQDTKLHLQNIHLHEPNRGKLAQYFAMNKDKKRKFKRRESLPEQRSQMKGAFDRDAEYIRALRRHLVYYPSARPVLSLSSGSWTLKLHFFQEVLGASMRALYIVRDPRAWIYSMLYNSKPSLYSLKNVPEHLAKLFKIEGGKGKCNLNSGYAFEYEPLRKELSKSKSNAVSLLSHLWLANTAAALRINTDLLPTSYQLVKFEDIVHFPQKTTERIFAFLGIPLSPASLNQILFATSTNLFYLPYEGEISPTNTNVWKQNLPRDEIKLIENICWTLMDRLGYPKFMD

SEQ ID NO: 2205 - protein, 951 aa, Homo sapiens
MRLGALYTYWVPLGFVLAVTVIREAVEEIRCYVRDKEVNSQVYSRLTARGTVKVKSSNIQVGDLIIVEKNQRVPADMIFLRTSEKNGSCFLRTDQLDGETDWKLRLPVACTQRLPTAADLLQIRSYVYAEEPNIDIHNFVGTFTREDSDPPISESLSIENTLWAGTVVASGTVVGVVLYTGRELRSVMNTSNPRSKIGLFDLEVNCLTKILFGALVVVSLVMVALQHFAGRWYLQIIRFLLLFSNIIPISLRVNLDMGKIVYSWVIRRDSKIPGTVVRSSTIPEQLGRISYLLTDKTGTLTQNEMIFKRLHLGTVAYGLDSMDEVQSHIFSIYTQQSQDPPAQKGPTLTTKVRRTMSSRVHEAVKAIALCHNVTPVYESNGVTDQAEAEKQYEDSCRVYQASSPDEVALVQWTESVGLTLVGRDQSSMQLRTPGDQILNFTILQIFPFTYESKRMGIIVRDESTGEITFYMKGADVVMAGIVQYNDWLEEECGNMAREGLRVLVVAKKSLAEEQYQDFEARYVQAKLSVHDRSLKVATVIESLEMEMELLCLTGVEDQLQADVRPTLETLRNAGIKVWMLTGDKLETATCTAKNAHLVTRNQDIHVFRLVTNRGEAHLELNAFRRKHDCALVISGDSLEVCLKYYEYEFMELACQCPAVVCCRCAPTQKAQIVRLLQERTGKLTCAVGDGGNDVSMIQESDCGVGVEGKEGKQASLAADFSITQFKHLGRLLMVHGRNSYKRSAALSQFVIHRSLCISTMQAVFSSVFYFASVPLYQGFLIIGYSTIYTMFPVFSLVLDKDVKSEVAMLYPELYKDLLKGRPLSYKTFLIWVLISIYQGSTIMYGALLLFESEFVHIVAISFTSLILTELLMVALTIQTWHWLMTVAELLSLACYIASLVFLHEFIDVYFIATLSFLWKVSVITLVSCLPLYVLKYLRRRFSPPSYSKLTS

SEQ ID NO: 2206 - protein, 45 aa, Homo sapiens
MILVAWMVIALILFLLRPPNLRGSSLPGKPTSPHNGQDPPAPPVD

SEQ ID NO: 2207 - protein, 455 aa, Homo sapiens
MLLLPLLLLLVATTGPVGALTDEEKRLMVELHNLYRAQVSPTASDMLHMRWDEELAAFAKAYARQCVWGHNKERGRRGENLFAITDEGMDVPLAMEEWHHEREHYNLSAATCSPGQMCGHYTQVVWAKTERIGCGSHFCEKLQGVEETNIELLVCNYEPPGNVKGKRPYQEGTPCSQCPSGYHCKNSLCEPIGSPEDAQDLPYLVTEAPSFRATEASDSRKMGTPSSLATGIPAFLVTEVSGSLATKALPAVETQAPTSLATKDPPSMATEAPPCVTTEVPSILAAHSLPSLDEEPVTFPKSTHVPIPKSADKVTDKTKVPSRSPENSLDPKMSLTGARELLPHAQEEAEAEAELPPSSEVLASVFPAQDKPGELQATLDHTGHTSSKSLPNFPNTSATANATGGRALALQSSLPGAEGPDKPSVVSGLNSGPGHVWGPLLGLLLLPPLVLAGIF

SEQ ID NO: 2208 - protein, 1007 aa, Homo sapiens
MVCSLWVLLLVSSVLALEEVLLDTTGETSEIGWLTYPPGGWDEVSVLDDQRRLTRTFEACHVAGAPPGTGQDNWLQTHFVERRGAQRAHIRLHFSVRACSSLGVSGGTCRETFTLYYRQAEEPDSPDSVSSWHLKRWTKVDTIAADESFPSSSSSSSSSSSSAAWAVGPHGAGQRAGLQLNVKERSFGPLTQRGFYVAFQDTGACLALVAVRLFSYTCPAVLRSFASFPETQASGAGGASLVAAVGTCVAHAEPEEDGVGGQAGGSPPRLHCNGEGKWMVAVGGCRCQPGYQPARGDKACQACPRGLYKASAGNAPCSPCPARSHAPNPAAPVCPCLEGFYRASSDPPEAPCTGPPSAPQELWFEVQGSALMLHWRLPRELGGRGDLLFNVVCKECEGRQEPASGGGGTCHRCRDEVHFDPRQRGLTESRVLVGGLRAHVPYILEVQAVNGVSELSPDPPQAAAINVSTSHEVPSAVPVVHQVSRASNSITVSWPQPDQTNGNILDYQLRYYDQAEDESHSFTLTSETNTATVTQLSPGHIYGFQVRARTAAGHGPYGGKVYFQTLPQGELSSQLPERLSLVIGSILGALAFLLLAAITVLAVVFQRKRRGTGYTEQLQQYSSPGLGVKYYIDPSTYEDPCQAIRELAREVDPAYIKIEEVIGTGSFGEVRQGRLQPRGRREQTVAIQALWAGGAESLQMTFLGRAAVLGQFQHPNILRLEGVVTKSRPLMVLTEFMELGPLDSFLRQREGQFSSLQLVAMQRGVAAAMQYLSSFAFVHRSLSAHSVLVNSHLVCKVARLGHSPQGPSCLLRWAAPEVIAHGKHTTSSDVWSFGILMWEVMSYGERPYWDMSEQEVLNAIEQEFRLPPPPGCPPGLHLLMLDTWQKDRARRPHFDQLVAAFDKMIRKPDTLQAGGDPGERPSQALLTPVALDFPCLDSPQAWLSAIGLECYQDNFSKFGLCTFSDVAQLSLEDLPALGITLAGHQKKLLHHIQLLQQHLRQQGSVEV

SEQ ID NO: 2209 - protein, 281 aa, Homo sapiens
MGTALKLLLGAGAVAYGVRESVFTVEGGHRAIFFNRIGGVQQDTILAEGLHFRIPWFQYPIIYDIRARPRKISSPTGSKDLQMVNISLRVLSRPNAQELPSMYQRLGLDYEERVLPSIVNEVLKSVVAKFNASQLITQRAQVSLLIRRELTERAKDFSLILDDVAITELSFSREYTAAVEAKQVAQQEAQRAQFLVEKAKQEQRQKIVQAEGEAEAAKMLGEALSKNPGYIKLRKIRAAQNISKTIATSQNRIYLTADNLVLNLQDESFTRGSDSLIKGKK

SEQ ID NO: 2210 - protein, 128 aa, Homo sapiens
MSLRGKAVVLMGKNTMMRKAIRGHLENNPALEKLLPHIRGNVGFVFTKEDLTEIRDMLLANKVPAAARAGAIAPCEVTVPAQNTGLGPEKTSFFQALGITTKISRGTIEILVSGPGLPVLTRQMGSCF

SEQ ID NO: 2211 - protein, 54 aa, Homo sapiens
MSLLLPPLALLLLLAALVAPATAATAYRPDWNRLSGLTRARVEGPAFPSDLGNC

SEQ ID NO: 2212 - protein, 262 aa, Homo sapiens
MPFSHLSTYSLVWVMAAVVLCTAQVQVVTQDEREQLYTPASLKCSLQNAQEALIVTWQKKKAVSPENMVTFSENHGVVIQPAYKDKINITQLGLQNSTITFWNITLEDEGCYMCLFNTFGFGKISGTACLTVYVQPIVSLHYKFSEDHLNITCSATARPAPMVFWKVPRSGIENSTVTLSHPNGTTSVTSILHIKDPKNQVGKEVICQVLHLGTVTDFKQTVNKGYWFSVPLLLSIVSLVILLVLISILLYWKRHRNQDREP

SEQ ID NO: 2213 - protein, 66 aa, Homo sapiens [sequence omitted]

SEQ ID NO: 2214 - protein, 43 aa, Homo sapiens
MGHTGAVWCVDADWDTKHVLTGSADNSCRLWDCETVWRGVGEC

SEQ ID NO: 2215 - protein, 149 aa, Homo sapiens
MDSTEPPCSQKRYEEIVKEVSTYIKKIGYNPNTVAFVPISGWNDDNMLEATANVPSFKGWKVTCKDGNASGTTLLEALDYILPPSGPTDKPLRLPLQDVHKIGGIGTVLGGQVKTGVLKPGMVVSFAAVDVTTEIKSVEMHQEALSEIK

SEQ ID NO: 2216 - protein, 575 aa, Homo sapiens
LPAMETPSQRRATRSGAQASSTPLSPTRITRLQEKEDLQELNDRLAVYIDRVRSLETENAGLRLRITESEEVVSREVSGIKAAYEAELGDARKTLDSVAKERARLQLELSKVREEFKELKARNTKKEGDLIAAQARLKDLEALLNSKEAALSTALSEKRTLEGELHDLRGQVAKLEAALGEAKKQLQDEMLRRVDAENRLQTMKEELDFQKNIYSEELRETKRRHETRLVEIDNGKQREFESRLADALQELRAQHEDQVEQYKKELEKTYSAKLDNARQSAERNSNLVGAAHEELQQSRIRIDSLSAQLSQLQKQLAAKEAKLRDLEDSLARERDTSRRLLAEKEREMAEMRARMQQQLDEYQELLDIKLALDMEIHAYRKLLEGEEERLRLSPSPTSQRSRGRASSHSSQTQGGGSVTKKRKLESTESRSSFSQHARTSGRVAVEEVDEEGKFVRLRNKSNEDQSMGNWQIKRQNGDDPLLTYRFPPKFTLKAGQVVTIWAAGAGATHSPPTDLVWKAQNTWGCGNSLRTALINSTGEEVAMRKLVRSVTVVEDDEDEDGDDLLHHHHVSGSRR

SEQ ID NO: 2217 - protein, 667 aa, Homo sapiens
LPAMETPSQRRATRSGAQASSTPLSPTRITRLQEKEDLQELNDRLAVYIDRVRSLETENAGLRLRITESEEVVSREVSGIKAAYEAELGDARKTLDSVAKERARLQLELSKVREEFKELKARNTKKEGDLIAAQARLKDLEALLNSKEAALSTALSEKRTLEGELHDLRGQVAKLEAALGEAKKQLQDEMLRRVDAENRLQTMKEELDFQKNIYSEELRETKRRHETRLVEIDNGKQREFESRLADALQELRAQHEDQVEQYKKELEKTYSAKLDNARQSAERNSNLVGAAHEELQQSRIRIDSLSAQLSQLQKQLAAKEAKLRDLEDSLARERDTSRRLLAEKEREMAEMRARMQQQLDEYQELLDIKLALDMEIHAYRKLLEGEEERLRLSPSPTSQRSRGRASSHSSQTQGGGSVTKKRKLESTESRSSFSQHARTSGRVAVEEVDEEGKFVRLRNKSNEDQSMGNWQIKRQNGDDPLLTYRFPPKFTLKAGQVVTIWAAGAGATHSPPTDLVWKAQNTWGCGNSLRTALINSTGEEVAMRKLVRSVTVVEDDEDEDGDDLLHHHHGSHCSSSGDPAEYNLRSRTVLCGTCGQPADKASASGSGAQVGGPISSGSSASSVTVTRSYRSVGGSGGGSFGDNLVTRSYLLGNSSPRTQSPQNCSIM

SEQ ID NO: 2218 - protein, 1234 aa, Homo sapiens
IQKMRLLAKIICLMLWAICVAEDCNELPPRRNTEILTGSWSDQTYPEGTQAIYKCRPGYRSLGNVIMVCRKGEWVALNPLRKCQKRPCGHPGDTPFGTFTLTGGNVFEYGVKAVYTCNEGYQLLGEINYRECDTDGWTNDIPICEVVKCLPVTAPENGKIVSSAMEPDREYHFGQAVRFVCNSGYKIEGDEEMHCSDDGFWSKEKPKCVEISCKSPDVINGSPISQKIIYKENERFQYKCNMGYEYSERGDAVCTESGWRPLPSCEEKSCDNPYIPNGDYSPLRIKHRTGDEITYQCRNGFYPATRGNTAKCTSTGWIPAPRCTLKPCDYPDIKHGGLYHENMRRPYFPVAVGKYYSYYCDEHFETPSGSYWDHIHCTQDGWSPAVPCLRKCYFPYLENGYNQNHGRKFVQGKSIDVACHPGYALPKAQTTVTCMENGWSPTPRCIRVKTCSKSSIDIENGFISESQYTYALKEKAKYQCKLGYVTADGETSGSITCGKDGWSAQPTCIKSCDIPVFMNARTKNDFTWFKLNDTLDYECHDGYESNTGSTTGSIVCGYNGWSDLPICYERECELPKIDVHLVPDRKKDQYKVGEVLKFSCKPGFTIVGPNSVQCYHFGLSPDLPICKEQVQSCGPPPELLNGNVKEKTKEEYGHSEVVEYYCNPRFLMKGPNKIQCVDGEWTTLPVCIVEESTCGDIPELEHGWAQLSSPPYYYGDSVEFNCSESFTMIGHRSITCIHGVWTQLPQCVAIDKLKKCKSSNLIILEEHLKNKKEFDHNSNIRYRCRGKEGWIHTVCINGRWDPEVNCSMAQIQLCPPPPQIPNSHNMTTTLNYRDGEKVSVLCQENYLIQEGEEITCKDGRWQSIPLCVEKIPCSQPPQIEHGTINSSRSSQESYAHGTKLSYTCEGGFRISEENETTCYMGKWSSPPQCEGLPCKSPPEISHGVVAHMSDSYQYGEEVTYKCFEGFGIDGPAIAKCLGEKWSHPPSCIKTDCLSLPSFENAIPMGEKKDVYKAGEQVTYTCATYYKMDGASNVTCINSRWTGRPTCRDTSCVNPPTVQNAYIVSRQMSKYPSGERVRYQCRSPYEMFGDEEVMCLNGNWTEPPQCKDSTGKCGPPPPIDNGDITSFPLSVYAPASSVEYQCQNLYQLEGNKRITCRNGQWSEPPKCLHPCVISREIMENYNIALRWTAKQKLYSRTGESVEFVCKRGYRLSSRSHTLRTTCWDGKLEYPTCAKR

SEQ ID NO: 2219 - protein, 160 aa, Homo sapiens
LAALALVLALAPGLPTARAGQTPRPAERGPPVRLFTEEELARYGGEEEDQPIYLAVKGVVFDVTSGKEFYGRGAPYNALTGKDSTRGVAKMSLDPADLTHDTTGLTAKELEALDEVFTKVYKAKYPIVGYTARRILNEDGSPNLDFKPEDQPHFDIKDEF

SEQ ID NO: 2220 - protein, 163 aa, Homo sapiens
IVQNTLPVACLLFTMASSDIQVKELEKRASGQAFELILSPRSKESVPEFPLSPPKKKDLSLEEIQKKLEAAEERRKSHEAEVLKQLAEKREHEKEVLQKAIEENNNFSKMAEEKLTHKMEANKENREAQMAAKLERLREKDKHIEEVRKNKESKDPADETEAD

SEQ ID NO: 2221 - protein, 12 aa, Homo sapiens
METPWLRRPSSL

SEQ ID NO: 2222 - protein, 72 aa, Homo sapiens
ISSKTMGIMNSFVNDIFERIAGEASRLAHYNKRSTITSREIQTAVRLLLPGELAKHAVSEGTKAVTKYTSSK

SEQ ID NO: 2223 - protein, 4383 aa, Homo sapiens
LLLALLLHGRLLAVTHGLRAYDGLSLPEDIETVTASQMRWTHSYLSDDEDMLADSISGDDLGSGDLGSGDFQMVYFRALVNFTRSIEYSPQLEDAGSREFREVSEAVVDTLESEYLKIPGDQVVSVVFIKELDGWVFVELDVGSEGNADGAQIQEMLLRVISSGSVASYVTSPQGFQFRRLGTVPQFPRACTEAEFACHSYNECVALEYRCDRRPDCRDMSDELNCEEPVLGISPTFSLLVETTSLPPRPETTIMRQPPVTHAPQPLLPGSVRPLPCGPQEAACRNGHCIPRDYLCDGQEDCEDGSDELDCGPPPPCEPNEFPCGNGHCALKLWRCDGDFDCEDRTDEANCPTKRPEEVCGPTQFRCVSTNMCIPASFHCDEESDCPDRSDEFGCMPPQVVTPPRESIQASRGQTVTFTCVAIGVPTPIINWRLNWGHIPSHPRVTVTSEGGRGTLIIRDVKESDQGAYTCEAMNARGMVFGIPDGVLELVPQRGPCPDGHFYLEHSAACLPCFCFGITSVCQSTRRFRDQIRLRFDQPDDFKGVNVTMPAQPGTPPLSSTQLQIDPSLHEFQLVDLSRRFLVHDSFWALPEQFLGNKVDSYGGSLRYNVRYELARGMLEPVQRPDVVLMGAGYRLLSRGHTPTQPGALNQRQVQFSEEHWVHESGRPVQRAELLQVLQSLEAVLIQTVYNTKMASVGLSDIAMDTTVTHATSHGRAHSVEECRCPIGYSGLSCESCDAHFTRVPGGPYLGTCSGCNCNGHASSCDPVYGHCLNCQHNTEGPQCNKCKAGFFGDAMKATATSCRPCPCPYIDASRRFSDTCFLDTDGQATCDACAPGYTGRRCESCAPGYEGNPIQPGGKCRPVNQEIVRCDERGSMGTSGEACRCKNNVVGRLCNECADGSFHLSTRNPDGCLKCFCMGVSRHCTSSSWSRAQLHGASEEPGHFSLTNAASTHTTNEGIFSPTPGELGFSSFHRLLSGPYFWSLPSRFLGDKVTSYGGELRFTVTQRSQPGSTPLHGQPLVVLQGNNIILEHHVAQEPSPGQPSTFIVPFREQAWQRPDGQPATREHLLMALAGIDTLLIRASYAQQPAESRVSGISMDVAVPEETGQDPALEVEQCSCPPGYRGPSCQDCDTGYTRTPSGLYLGTCERCSCHGHSEACEPETGACQGCQHHTEGPRCEQCQPGYYGDAQRGTPQDCQLCPCYGDPAAGQAAHTCFLDTDGHPTCDACSPGHSGRHCERCAPGYYGNPSQGQPCQRDSQVPGPIGCNCDPQGSVSSQCDAAGQCQCKAQVEGLTCSHCRPHHFHLSASNPDGCLPCFCMGITQQCASSAYTRHLISTHFAPGDFQGFALVNPQRNSRLTGEFTVEPVPEGAQLSFGNFAQLGHESFYWQLPETYQGDKVAAYGGKLRYTLSYTAGPQGSPLSDPDVQITGNNIMLVASQPALQGPERRSYEIMFREEFWRRPDGQPATREHLLMALADLDELLIRATFSSVPLAASISAVSLEVAQPGPSNRPRALEVEECRCPPGYIGLSCQDCAPGYTRTGSGLYLGHCELCECNGHSDLCHPETGACSQCQHNAAGEFCELCAPGYYGDATAGTPEDCQPCACPLTNPENMFSRTCESLGAGGYRCTACEPGYTGQYCEQCGPGYVGNPSVQGGQCLPETNQAPLVVEVHPARSIVPQGGSHSLRCQVSGSPPHYFYWSREDGRPVPSGTQQRHQGSELHFPSVQPSDAGVYICTCRNLHQSNTSRAELLVTEAPSKPITVTVEEQRSQSVRPGADVTFICTAKSKSPAYTLVWTRLHNGKLPTRAMDFNGILTIRNVQLSDAGTYVCTGSNMFAMDQGTATLHVQASGTLSAPVVSIHPPQLTVQPGQLAEFRCSATGSPTPTLEWTGGPGGQLPAKAQIHGGILRLPAVEPTDQAQYLCRAHSSAGQQVARAVLHVHGGGGPRVQVSPERTQVHAGRTVRLYCRAAGVPSATITWRKEGGSLPPQARSERTDIATLLIPAITTADAGFYLCVATSPAGTAQARIQVVVLSASDASPPPVKIESSSPSVTEGQTLDLNCVVAGSAHAQVTWYRRGGSLPPHTQVHGSRLRLPQVSPADSGEYVCRVENGSGPKEASITVSVLHGTHSGPSYTPVPGSTRPIRIEPSSSHVAEGQTLDLNCVVPGQAHAQVTWHKRGGSLPARHQTHGSLLRLHQVTPADSGEYVCHVVGTSGPLEASVLVTIEASVIPGPIPPVRIESSSSTVAEGQTLDLSCVVAGQAHAQVTWYKRGGSLPARHQVRGSRLYIFQASPADAGQYVCRASNGMEASITVTVTGTQGANLAYPAGSTQPIRIEPSSSQVAEGQTLDLNCVVPGQSHAQVTWHKRGGSLPVRHQTHGSLLRLYQASPADSGEYVCRVLGSSVPLEASVLVTIEPAGSVPALGVTPTVRIESSSSQVAEGQTLDLNCLVAGQAHAQVTWHKRGGSLPARHQVHGSRLRLLQVTPADSGEYVCRVVGSSGTQEASVLVTIQQRLSGSHSQGVAYPVRIESSSASLANGHTLDLNCLVASQAPHTITWYKRGGSLPSRHQIVGSRLRIPQVTPADSGEYVCHVSNGAGSRETSLIVTIQGSGSSHVPSVSPPIRIESSSPTVVEGQTLDLNCVVARQPQAIITWYKRGGSLPSRHQTHGSHLRLHQMSVADSGEYVCRANNNIDALEASIVISVSPSAGSPSAPGSSMPIRIESSSSHVAEGETLDLNCVVPGQAHAQVTWHKRGGSLPSHHQTRGSRLRLHHVSPADSGEYVCRVMGSSGPLEASVLVTIEASGSSAVHVPAPGGAPPIRIEPSSSRVAEGQTLDLKCVVPGQAHAQVTWHKRGGNLPARHQVHGPLLRLNQVSPADSGEYSCQVTGSSGTLEASVLVTIEPSSPGPIPAPGLAQPIYIEASSSHVTEGQTLDLNCVVPGQAHAQVTWYKRGGSLPARHQTHGSQLRLHLVSPADSGEYVCRAASGPGPEQEASFTVTVPPSEGSSYRLRSPVISIDPPSSTVQQGQDASFKCLIHDGAAPISLEWKTRNQELEDNVHISPNGSIITIVGTRPSNHGTYRCVASNAYGVAQSVVNLSVHGPPTVSVLPEGPVWVKVGKAVTLECVSAGEPRSSARWTRISSTPAKLEQRTYGLMDSHAVLQISSAKPSDAGTYVCLAQNALGTAQKQVEVIVDTGAMAPGAPQVQAEEAELTVEAGHTATLRCSATGSPAPTIHWSKLRSPLPWQHRLEGDTLIIPRVAQQDSGQYICNATSPAGHAEATIILHVESPPYATTVPEHASVQAGETVQLQCLAHGTPPLTFQWSRVGSSLPGRATARNELLHFERAAPEDSGRYRCRVTNKVGSAEAFAQLLVQGPPGSLPATSIPAGSTPTVQVTPQLETKSIGASVEFHCAVPSDRGTQLRWFKEGGQLPPGHSVQDGVLRIQNLDQSCQGTYICQAHGPWGKAQASAQLVIQALPSVLINIRTSVQTVVVGHAVEFECLALGDPKPQVTWSKVGGHLRPGIVQSGGVVRIAHVELADAGQYRCTATNAAGTTQSHVLLLVQALPQISMPQEVRVPAGSAAVFPCIASGYPTPDISWSKLDGSLPPDSRLENNMLMLPSVRPQDAGTYVCTATNRQGKVKAFAHLQVPERVVPYFTQTPYSFLPLPTIKDAYRKFEIKITFRPDSADGMLLYNGQKRVPGSPTNLANRQPDFISFGLVGGRPEFRFDAGSGMATIRHPTPLALGHFHTVTLLRSLTQGSLIVGDLAPVNGTSQGKFQGLDLNEELYLGGYPDYGAIPKAGLSSGFIGCVRELRIQGEEIVFHDLNLTAHGISHCPTCRDRPCQNGGQCHDSESSSYVCVCPAGFTGSRCEHSQALHCHPEACGPDATCVNRPDGRGYTCRCHLGRSGLRCEEGVTVTTPSLSGAGSYLALPALTNTHHELRLDVEFKPLAPDGVLLFSGGKSGPVEDFVSLAMVGGHLEFRYELGSGLAVLRSAEPLALGRWHRVSAERLNKDGSLRVNGGRPVLRSSPGKSQGLNLHTLLYLGGVEPSVPLSPATNMSAHFRGCVGEVSVNGKRLDLTYSFLGSQGIGQCYDSSPCERQPCQHGATCMPAGEYEFQCLCRDGFKGDLCEHEENPCQLREPCLHGGTCQGTRCLCLPGFSGPRCQQGSGHGIAESDWHLEGSGGNDAPGQYGAYFHDDGFLAFPGHVFSRSLPEVPETIELEVRTSTASGLLLWQGVEVGEAGQGKDFISLGLQDGHLVFRYQLGSGEARLVSEDPINDGEWHRVTALREGRRGSIQVDGEELVSGRSPGPNVAVNAKGSVYIGGAPDVATLTGGRFSSGITGCVKNLVLHSARPGAPPPQPLDLQHRAQAGANTRPCPS

SEQ ID NO: 2224 - protein, 29 aa, Homo sapiens
LGDLLGTGLLALSFHVLWLIGDRDTDVGD

SEQ ID NO: 2225 - protein, 352 aa, Homo sapiens
VGTLHLLLLVAALPWASRGVSPSASAWPEEKNYHQPAILNSSALRQIAEGTSISEMWQNDLQPLLIERYPGSPGSYAARQHIMQRIQRLQADWVLEIDTFLSQTPYGYRSFSNIISTLNPTAKRHLVLACHYDSKYFSHWNNRVFVGATDSAVPCAMMLELARALDKKLLSLKTVSDSKPDLSLQLIFFDGEEAFLHWSPQDSLYGSRHLAAKMASTPHPPGARGTSQLHGMDLLVLLDLIGAPNPTFPNFFPNSARWFERLQAIEHELHELGLLKDHSLEGRYFQNYSYGGVIQDDHIPFLRRGVPVLHLIPSPFPEVWHTMDDNEENLDESTIDNLNKILQVFVLEYLHL

SEQ ID NO: 2226 - protein, 1017 aa, Homo sapiens
LLGLLLLLARSGTRALVCLPCDESKCEEPRNCPGSIVQGVCGCCYTCASQRNESCGGTFGIYGTCDRGLRCVIRPPLNGDSLTEYEAGVCEDENWTDDQLLGFKPCNENLIAGCNIINGKCECNTIRTCSNPFEFPSQDMCLSALKRIEEEKPDCSKARCEVQFSPRCPEDSVLIEGYAPPGECCPLPSRCVCNPAGCLRKVCQPGNLNILVSKASGKPGECCDLYECKPVFGVDCRTVECPPVQQTACPPDSYETQVRLTADGCCTLPTRCECLSGLCGFPVCEVGSTPRIVSRGDGTPGKCCDVFECVNDTKPACVFNNVEYYDGDMFRMDNCRFCRCQGGVAICFTAQCGEINCERYYVPEGECCPVCEDPVYPFNNPAGCYANGLILAHGDRWREDDCTFCQCVNGERHCVATVCGQTCTNPVKVPGECCPVCEEPTIITVDPPACGELSNCTLTGKDCINGFKRDHNGCRTCQCINTEELCSERKQGCTLNCPFGFLTDAQNCEICECRPRPKKCRPIICDKYCPLGLLKNKHGCDICRCKKCPELSCSKICPLGFQQDSHGCLICKCREASASAGPPILSGTCLTVDGHHHKNEESWHDGCRECYCLNGREMCALITCPVPACGNPTIHPGQCCPSCADDFVVQKPELSTPSICHAPGGEYFVEGETWNIDSCTQCTCHSGRVLCETEVCPPLLCQNPSRTQDSCCPQCTDQPFRPSLSRNNSVPNYCKNDEGDIFLAAESWKPDVCTSCICIDSVISCFSESCPSVSCERPVLRKGQCCPYCIEDTIPKKVVCHFSGKAYADEERWDLDSCTHCYCLQGQTLCSTVSCPPLPCVEPINVEGSCCPMCPEMYVPEPTNIPIEKTNHRGEVDLEVPLWPTPSENDIVHLPRDMGHLQVDYRDNRLHPSEDSSLDSIASVVVPIIICLSIIIAFLFINQKKQWIPLLCWYRTPTKPSSLNNQLVSVDCKKGTRVQVDSSQRMLRIAEPDARFSGFYSMQKQNHLQADNFYQTV

SEQ ID NO: 2227 - protein, 572 aa, Homo sapiens
KKNMKVLLRLICFIALLISSLEADKCKEREEKIILVSSANEIDVRPCPLNPNEHKGTITWYKDDSKTPVSTEQASRIHQHKEKLWFVPAKVEDSGHYYCVVRNSSYCLRIKISAKFVENEPNLCYNAQAIFKQKLPVAGDGGLVCPYMEFFKNENNELPKLQWYKDCKPLLLDNIHFSGVKDRLIVMNVAEKHRGNYTCHASYTYLGKQYPITRVIEFITLEENKPTRPVIVSPANETMEVDLGSQIQLICNVTGQLSDIAYWKWNGSVIDEDDPVLGEDYYSVENPANKRRSTLITVLNISEIESRFYKHPFTCFAKNTHGIDAAYIQLIYPVTNFQKHMIGICVTLTVIIVCSVFIYKIFKIDIVLWYRDSCYDFLPIKASDGKTYDAYILYPKTVGEGSTSDCDIFVFKVLPEVLEKQCGYKLFIYGRDDYVGEDIVEVINENVKKSRRLIIILVRETSGFSWLGGSSEEQIAMYNALVQDGIKVVLLELEKIQDYEKMPESIKFIKQKHGAIRWSGDFTQGPQSAKTRFWKNVRYHMPVQRRSPSSKHQLLSPATKEKLQREAHVPLG

SEQ ID NO: 2228 - protein, 771 aa, Homo sapiens
LLLSVLRPAGPVAVGISLGFTLSLLSVTWVEEPCGPGPPQPGDSELPPRGNTNAARRPNSVQPGAEREKPGAGEGAGENWEPRVLPYHPAQPGQAAKKAVRTRYISTELGIRQRLLVAVLTSQTTLPTLGVAVNRTLGHRLERVVFLTGARGRRAPPGMAVVTLGEERPIGHLHLALRHLLEQHGDDFDWFFLVPDTTYTEAHGLARLTGHLSLASAAHLYLGRPQDFIGGEPTPGRYCHGGFGVLLSRMLLQQLRPHLEGCRNDIVSARPDEWLGRCILDATGVGCTGDHEGVHYSHLELSPGEPVQEGDPHFRSALTAHPVRDPVHMYQLHKAFARAELERTYQEIQELQWEIQNTSHLAVDGDQAAAWPVGIPAPSRPASRFEVLRWDYFTEQHAFSCADGSPRCPLRGADRADVADVLGTALEELNRRYHPALRLQKQQLVNGYRRFDPARGMEYTLDLQLEALTPQGGRRPLTRRVQLLRPLSRVEILPVPYVTEASRLTVLLPLAAAERDLAPGFLEAFATAALEPGDAAAALTLLLLYEPRQAQRVAHADVFAPVKAHVAELERRFPGARVPWLSVQTAAPSPLRLMDLLSKKHPLDTLFLLAGPDTVLTPDFLNRCRMHAISGWQAFFPMHFQAFHPAVAPPQGPGPPELGRDTGRFDRQAASEACFYNSDYVAARGRLAAASEQEEELLESLDVYELFLHFSSLHVLRAVEPALLQRYRAQTCSARLSEDLYHRCLQSVLEGLGSRTQLAMLLFEQEQGNST

SEQ ID NO: 2229 - protein, 2603 aa, Homo sapiens
RMPVTEKDLAEDAPWKKIQQNTFTRWCNEHLKCVNKRIGNLQTDLSDGLRLIALLEVLSQKRMYRKYHQRPTFRQMQLENVSVALEFLDRESIKLVSIDSKAIVDGNLKLILGLVWTLILHYSISMPVWEDEGDDDAKKQTPKQRLLGWIQNKIPYLPITNFNQNWQDGKALGALVDSCAPGLCPDWESWDPQKPVDNAREAMQQADDWLGVPQVITPEEIIHPDVDEHSVMTYLSQFPKAKLKPGAPLKPKLNPKKARAYGRGIEPTGNMVKQPAKFTVDTISAGQGDVMVFVEDPEGNKEEAQVTPDSDKNKTYSVEYLPKVTGLHKVTVLFAGQHISKSPFEVSVDKAQGDASKVTAKGPGLEAVGNIANKPTYFDIYTAGAGVGDIGVEVEDPQGKNTVELLVEDKGNQVYRCVYKPMQPGPHVVKIFFAGDTIPKSPFVVQVGEACNPNACRASGRGLQPKGVRIRETTDFKVDTKAAGSGELGVTMKGPKGLEELVKQKDFLDGVYAFEYYPSTPGRYSIAITWGGHHIPKSPFEVQVGPEAGMQKVRAWGPGLHGGIVGRSADFVVESIGSEVGSLGFAIEGPSQAKIEYNDQNDGSCDVKYWPKEPGEYAVHIMCDDEDIKDSPYMAFIHPATGGYNPDLVRAYGPGLEKSGCIVNNLAEFTVDPKDAGKAPLKIFAQDGEGQRIDIQMKNRMDGTYACSYTPVKAIKHTIAVVWGGVNIPHSPYRVNIGQGSHPQKVKVFGPGVERSGLKANEPTHFTVDCTEAGEGDVSVGIKCDARVLSEDEEDVDFDIIHNANDTFTVKYVPPAAGRYTIKVLFASQEIPASPFRVKVDPSHDASKVKAEGPGLSKAGVENGKPTHFTVYTKGAGKAPLNVQFNSPLPGDAVKDLDIIDNYDYSHTVKYTPTQQGNMQVLVTYGGDPIPKSPFTVGVAAPLDLSKIKLNGLENRVEVGKDQEFTVDTRGAGGQGKLDVTILSPSRKVVPCLVTPVTGRENSTAKFIPREEGLYAVDVTYDGHPVPGSPYTVEASLPPDPSKVKAHGPGLEGGLVGKPAEFTIDTKGAGTGGLGLTVEGPCEAKIECSDNGDGTCSVSYLPTKPGEYFVNILFEEVHIPGSPFKADIEMPFDPSKVVASGPGLEHGKVGEAGLLSVDCSEAGPGALGLEAVSDSGTKAEVSIQNNKDGTYAVTYVPLTAGMYTLTMKYGGELVPHFPARVKVEPAVDTSRIKVFGPGIEGKDVFREATTDFTVDSRPLTQVGGDHIKAHIANPSGASTECFVTDNADGTYQVEYTPFEKGLHVVEVTYDDVPIPNSPFKVAVTEGCQPSRVQAQGPGLKEAFTNKPNVFTVVTRGAGIGGLGITVEGPSESKINCRDNKDGSCSAEYIPFAPGDYDVNITYGGAHIPGSPFRVPVKDVVDPSKVKIAGPGLGSGVRARVLQSFTVDSSKAGLAPLEVRVLGPRGLVEPVNVVDNGDGTHTVTYTPSQEGPYMVSVKYADEEIPRSPFKVKVLPTYDASKVTASGPGLSSYGVPASLPVDFAIDARDAGEGLLAVQITDQEGKPKRAIVHDNKDGTYAVTYIPDKTGRYMIGVTYGGDDIPLSPYRIRATQTGDASKCLATGPGIASTVKTGEEVGFVVDAKTAGKGKVTCTVLTPDGTEAEADVIENEDGTYDIFYTAAKPGTYVIYVRFGGVDIPNSPFTVMATDGEVTAVEEAPVNACPPGFRPWVTEEAYVPVSDMNGLGFKPFDLVIPFAVRKGEITGEVHMPSGKTATPEIVDNKDGTVTVRYAPTEVGLHEMHIKYMGSHIPESPLQFYVNYPNSGSVSAYGPGLVYGVANKTATFTIVTEDAGEGGLDLAIEGPSKAEISCIDNKDGTCTVTYLPTLPGDYSILVKYNDKHIPGSPFTAKITDDSRRCSQVKLGSAADFLLDISETDLSSLTASIKAPSGRDEPCLLKRLPNNHIGISFIPREVGEHLVSIKKNGNHVANSPVSIMVVQSEIGDARRAKVYGRGLSEGRTFEMSDFIVDTRDAGYGGISLAVEGPSKVDIQTEDLEDGTCKVSYFPTVPGVYIVSTKFADEHVPGSPFTVKISGEGRVKESITRTSRAPSVATVGSICDLNLKIPEINSSDMSAHVTSPSGRVTEAEIVPMGKNSHCVRFVPQEMGVHTVSVKYRGQHVTGSPFQFTVGPLGEGGAHKVRAGGPGLERGEAGVPAEFSIWTREAGAGGLSIAVEGPSKAEITFDDHKNGSCGVSYIAQEPGNYEVSIKFNDEHIPESPYLVPVIAPSDDARRLTVMSLQESGLKVNQPASFAIRLNGAKGKIDAKVHSPSGAVEECHVSELEPDKYAVRFIPHENGVHTIDVKFNGSHVVGSPFKVRVGEPGQAGNPALVSAYGTGLEGGTTGIQSEFFINTTRAGPGTLSVTIEGPSKVKMDCQETPEGYKVMYTPMAPGNYLISVKYGGPNHIVGSPFKAKVTGQRLVSPGSANETSSILVESVTRSSTETCYSAIPKASSDASKVTSKGAGLSKAFVGQKSSFLVDCSKAGSNMLLIGVHGPTTPCEEVSMKHVGNQQYNVTYVVKERGDYVLAVKWGEEHIPGSPFHVTVP

SEQ ID NO: 2230 - protein, 320 aa, Homo sapiens
KALCALLLATLGAAGQPLGGESICSARALAKYSITFTGKWSQTAFPKQYPLFRPPAQWSSLLGAAHSSDYSMWRKNQYVSNGLRDFAERGEAWALMKEIEAAGEALQSVHAVFSAPAVPSGTGQTSAELEVQRRHSLVSFVVRIVPSPDWFVGVDSLDLCDGDRWREQAALDLYPYDAGTDSGFTFSSPNFATIPQDTVTEITSSSPSHPANSFYYPRLKALPPIARVTLVRLRQSPRAFIPPAPVLPSRDNEIVDSASVPETPLDCEVSLWSSWGLCGGHCGRLGTKSRTRYVRVQPANNGSPCPELEEEAECVPDNCV

SEQ ID NO: 2231 - protein, 155 aa, Homo sapiens
LLFWGVLAVFIKAVHVKAQEDERIVLVDNKCKCARITSRIIRSSEDPNEDIVERNIRIIVPLNNRENISDPTSPLRTRFVYHLSDLCKKCDPTEVELDNQIVTATQSNICDEDSATETCYTYDRNKCYTAVVPLVYGGETKMVETALTPDACYPD

SEQ ID NO: 2232 - protein, 530 aa, Homo sapiens
LPLGHACSFTMPGSLPLNAEACWPKDVGIVALEIYFPSQYVDQAELEKYDGVDAGKYTIGLGQAKMGFCTDREDINSLCMTVVQNLMERNNLSYDCIGRLEVGTETIIDKSKSVKTNLMQLFEESGNTDIEGIDTTNACYGGTAAVFNAVNWIESSSWDGRYALVVAGDIAVYATGNARPTGGVGAVALLIGPNAPLIFERGLRGTHMQHAYDFYKPDMLSEYPIVDGKLSIQCYLSALDRCYSVYCKKIHAQWQKEGNDKDFTLNDFGFMIFHSPYCKLVQKSLARMLLNDFLNDQNRDKNSIYSGLEAFGDVKLEDTYFDRDVEKAFMKASSELFSQKTKASLLVSNQNGNMYTSSVYGSLASVLAQYSPQQLAGKRIGVFSYGSGLAATLYSLKVTQDATPGSALDKITASLCDLKSRLDSRTGVAPDVFAENMKLREDTHHLVNYIPQGSIDSLFEGTWYLVRVDEKHRRTYARRPTPNDDTLDEGVGLVHSNIATEHIPSPAKKVPRLPATAAEPEAAVISNGEH

SEQ ID NO: 2233 - protein, 1118 aa, Homo sapiens
VPTPEAISSKDTMRLPGAMPALALKGELLLLSLLLLLEPQISQGLVVTPPGPELVLNVSSTFVLTCSGSAPVVWERMSQEPPQEMAKAQDGTFSSVLTLTNLTGLDTGEYFCTHNDSRGLETDERKRLYIFVPDPTVGFLPNDAEELFIFLTEITEITIPCRVTDPQLVVTLHEKKGDVALPVPYDHQRGFSGIFEDRSYICKTTIGDREVDSDAYYVYRLQVSSINVSVNAVQTVVRQGENITLMCIVIGNEVVNFEWTYPRKESGRLVEPVTDFLLDMPYHIRSILHIPSAELEDSGTYTCNVTESVNDHQDEKAINITVVESGYVRLLGEVGTLQFAELHRSRTLQVVFEAYPPPTVLWFKDNRTLGDSSAGEIALSTRNVSETRYVSELTLVRVKVAEAGHYTMRAFHEDAEVQLSFQLQINVPVRVLELSESHPDSGEQTVRCRGRGMPQPNIIWSACRDLKRCPRELPPTLLGNSSEEESQLETNVTYWEEEQEFEVVSTLRLQHVDRPLSVRCTLRNAVGQDTQEVIVVPHSLPFKVVVISAILALVVLTIISLIILIMLWQKKPRYEIRWKVIESVSSDGHEYIYVDPMQLPYDSTWELPRDQLVLGRTLGSGAFGQVVEATAHGLSHSQATMKVAVKMLKSTARSSEKQALMSELKIMSHLGPHLNVVNLLGACTKGGPIYIITEYCRYGDLVDYLHRNKHTFLQHHSDKRRPPSAELYSNALPVGLPLPSHVSLTGESDGGYMDMSKDESVDYVPMLDMKGDVKYADIESSNYMAPYDNYVPSAPERTCRATLINESPVLSYMDLVGFSYQVANGMEFLASKNCVHRDLAARNVLICEGKLVKICDFGLARDIMRDSNYISKGSTFLPLKWMAPESIFNSLYTTLSDVWSFGILLWEIFTLGGTPYPELPMNEQFYNAIKRGYRMAQPAHASDEIYEIMQKCWEEKFEIRPPFSQLVLLLERLLGEGYKKKYQQVDEEFLRSDHPAILRSQARLPGFHGLRSPLDTSSVLYTAVQPNEGDNDYIIPLPDPKPEVADEGPLEGSPSLASSTLNEVNTSSTISCDSPLEPQDEPEPEPQLELQVEPEPELEQLPDSGCPAPRAEAEDSFL

SEQ ID NO: 2234 - protein, 667 aa, Homo sapiens
LSSCRGSRPPFPAPSLRAEPTEQGTGMAKAAAIGIDLGTTYSCVGVFQHGKVEIIANDQGNRTTPSYVAFTDTERLIGDAAKNQVALNPQNTVFDAKRLIGRKFGDPVVQSDMKHWPFQVINDGDKPKVQVSYKGETKAFYPEEISSMVLTKMKEIAEAYLGYPVTNAVITVPAYFNDSQRQATKDAGVIAGLNVLRIINEPTAAAIAYGLDRTGKGERNVLIFDLGGGTFDVSILTIDDGIFEVKATAGDTHLGGEDFDNRLVNHFVEEFKRKHKKDISQNKRAVRRLRTACERAKRTLSSSTQASLEIDSLFEGIDFYTSITRARFEELCSDLFRSTLEPVEKALRDAKLDKAQIHDLVLVGGSTRIPKVQKLLQDFFNGRDLNKSINPDEAVAYGAAVQAAILMGDKSENVQDLLLLDVAPLSLGLETAGGVMTALIKRNSTIPTKQTQIFTTYSDNQPGVLIQVYEGERAMTKDNNLLGRFELSGIPPAPRGVPQIEVTFDIDANGILNVTATDKSTGKANKITITNDKGRLSKEEIERMVQEAEKYKAEDEVQRERVSAKNALESYAFNMKSAVEDEGLKGKISEADKKKVLDKCQEVISWLDANTLAEKDEFEHKRKELEQVCNPIISGLYQGAGGPGPGGFGAQGPKGGSGSGPTIEEVD

SEQ ID NO: 2235 - protein, 466 aa, Homo sapiens
LATMHGSCSFLMLLLPLLLLLVATTGPVGALTDEEKRLMVELHNLYRAQVSPTASDMLHMRWDEELAAFAKAYARQCVWGHNKERGRRGENLFAITDEGMDVPLAMEEWHHEREHYNLSAATCSPGQMCGHYTQVVWAKTERIGCGSHFCEKLQGVEETNIELLVCNYEPPGNVKGKRPYQEGTPCSQCPSGYHCKNSLCEPIGSPEDAQDLPYLVTEAPSFRATEASDSRKMGTPSSLATGIPAFLVTEVSGSLATKALPAVETQAPTSLATKDPPSMATEAPPCVTTEVPSILAAHSLPSLDEEPVTFPKSTHVPIPKSADKVTDKTKVPSRSPENSLDPKMSLTGARELLPHAQEEAEAEAELPPSSEVLASVFPAQDKPGELQATLDHTGHTSSKSLPNFPNTSATANATGGRALALQSSLPGAEGPDKPSVVSGLNSGPGHVWGPLLGLLLLPPLVLAGIF

SEQ ID NO: 2236 - protein, 403 aa, Homo sapiens
LARLALVLLGWVSSSSPTSSASSFSSSAPFLASAVSAQPPLPDQCPALCECSEAARTVKCVNRNLTEVPTDLPAYVRNLFLTGNQLAVLPAGAFARRPPLAELAALNLSGSRLDEVRAGAFEHLPSLRQLDLSHNPLADLSPFAFSGSNASVSAPSPLVELILNHIVPPEDERQNRSFEGMVVAALLAGRALQGLRRLELASNHFLYLPRDVLAQLPSLRHLDLSNNSLVSLTYVSFRNLTHLESLHLEDNALKVLHNGTLAELQGLPHIRVFLDNNPWVCDCHMADMVTWLKETEVVQGKDRLTCAYPEKMRNRVLLELNSADLDCDPILPPSLQTSYVFLGIVLALIGAIFLLVLYLNRKGIKKWMHNIRDACRDHMEGYHYRYEINADPRLTNLSSNSDV

SEQ ID NO: 2237 - protein, 216 aa, Homo sapiens
ILNMSETAPAAPAAAPPAEKAPVKKKAAKKAGGTPRKASGPPVSELITKAVAASKERSGVSLAALKKALAAAGYDVEKNNSRIKLGLKSLVSKGTLVQTKGTGASGSFKLNKKAASGEAKPKVKKAGGTKPKKPVGAAKKPKKAAGGATPKKSAKKTPKKAKKPAAATVTKKVAKSPKKAKVAKPKKAAKSAAKAVKPKAAKPKVVKPKKAAPKKK

SEQ ID NO: 2238 - protein, 285 aa, Homo sapiens
TLWAAALTLLVLLRGPPVARAGASSAGLGPVVRCEPCDARALAQCAPPPAVCAELVREPGCGCCLTCALSEGQPCGIYTERCGSGLRCQPSPDEARPLQALLDGRGLCVNASAVSRLRAYLLPAPPAPGNASESEEDRSAGSVESPSVSSTHRVSDPKFHPLHSKIIIIKKGHAKDSQRYKVDYESQSTDTQNFSSESKRETEYGPCRREMEDTLNHLKFLNVLSPRGVHIPNCDKKGFYKKKQCRPSKGRKRGFCWCVDKYGQPLPGYTTKGKEDVHCYSMQSK

SEQ ID NO: 2239 - protein, 161 aa, Homo sapiens
IMLPFLFFSTLFSSIFTEAQKQYWVCNSSDASISYTYCDKMQYPISINVNPCIELKRSKGLLHIFYIPRRDLKQLYFNLYITVNTMNLPKRKEVICRGSDDDYSFCRALKGETVNTTISFSFKGIKFSKGKYKCVVEAISGSPEEMLFCLEFVILHQPNSN

SEQ ID NO: 2240 - protein, 867 aa, Homo sapiens
KESEAPPLRSGGGGHKVWRPRVADGSPPPAPPPGHQLRLHCSRPGWRRRAPSAAGSRAPAAELLRPRQDPNRARGRRAGAGDAGTRPLAQATADSPEAEPPRRARVSLKRRIELTVEYPWRCGALSPTSNCRTGMWSWKCLLFWAVLVTATLCTARPSPTLPEQDALPSSEDDDDDDDSSSEEKETDNTKPNRMPVAPYWTSPEKMEKKLHAVPAAKTVKFKCPSSGTPNPTLRWLKNGKEFKPDHRIGGYKVRYATWSIIMDSVVPSDKGNYTCIVENEYGSINHTYQLDVVERSPHRPILQAGLPANKTVALGSNVEFMCKVYSDPQPHIQWLKHIEVNGSKIGPDNLPYVQILKTAGVNTTDKEMEVLHLRNVSFEDAGEYTCLAGNSIGLSHHSAWLTVLEALEERPAVMTSPLYLEIIIYCTGAFLISCMVGSVIVYKMKSGTKKSDFHSQMAVHKLAKSIPLRRQVTVSADSSASMNSGVLLVRPSRLSSSGTPMLAGVSEYELPEDPRWELPRDRLVLGKPLGEGCFGQVVLAEAIGLDKDKPNRVTKVAVKMLKSDATEKDLSDLISEMEMMKMIGKHKNIINLLGACTQDGPLYVIVEYASKGNLREYLQARRPPGLEYCYNPSHNPEEQLSSKDLVSCAYQVARGMEYLASKKCIHRDLAARNVLVTEDNVMKIADFGLARDIHHIDYYKKTTNGRLPVKWMAPEALFDRIYTHQSDVWSFGVLLWEIFTLGGSPYPGVPVEELFKLLKEGHRMDKPSNCTNELYMMMRDCWHAVPSQRPTFKQLVEDLDRIVALTSNQEYLDLSMPLDQYSPSFPDTRSSTCSSGEDSVFSHEPLPEEPCLPRHPAQLANGGLKRR

SEQ ID NO: 2241 - protein, 492 aa, Homo sapiens
LLLLVLAAAAAAAAALLPGATALQCFCHLCTKDNFTCVTDGLCFVSVTETTDKVIHNSMCIAEIDLIPRDRPFVCAPSSKTGSVTTTYCCNQDHCNKIELPTTVKSSPGLGPVELAAVIAGPVCFVCISLMLMVYICHNRTVIHHRVPNEEDPSLDRPFISEGTTLKDLIYDMTTSGSGSGLPLLVQRTIARTIVLQESIGKGRFGEVWRGKWRGEEVAVKIFSSREERSWFREAEIYQTVMLRHENILGFIAADNKDNGTWTQLWLVSDYHEHGSLFDYLNRYTVTVEGMIKLALSTASGLAHLHMEIVGTQGKPAIAHRDLKSKNILVKKNGTCCIADLGLAVRHDSATDTIDIAPNHRVGTKRYMAPEVLDDSINMKHFESFKRADIYAMGLVFWEIARRCSIGGIHEDYQLPYYDLVPSDPSVEEMRKVVCEQKLRPNIPNRWQSCEALRVMAKIMRECWYANGAARLTALRIKKTLSQLSQQEGIKM

SEQ ID NO: 2242 - protein, 44 aa, Homo sapiens
TKTRSMMALLVQLLSLCYKLLKKLQMENNGWVSVTNKDTMDSKT

SEQ ID NO: 2243 - protein, 766 aa, Homo sapiens
LSSAGNSGGVGRIGPRHLLAMGDVLSTHLDDARRQHIAEKTGKILTEFLQFYEDQYGVALFNSMRHEIEGTGLPQAQLLWRKVPLDERIVFSGNLFQHQEDSKKWRNRFSLVPHNYGLVLYENKAAYERQVPPRAVINSAGYKILTSVDQYLELIGNSLPGTTAKSGSAPILKCPTQFPLILWHPYARHYYFCMMTEAEQDKWQAVLQDCIRHCNNGIPEDSKVEGPAFTDAIRMYRQSKELYGTWEMLCGNEVQILSNLVMEELGPELKAELGPRLKGKPQERQRQWIQISDAVYHMVYEQAKARFEEVLSKVQQVQPAMQAVIRTDMDQIITSKEHLASKIRAFILPKAEVCVRNHVQPYIPSILEALMVPTSQGFTEVRDVFFKEVTDMNLNVINEGGIDKLGEYMEKLSRLAYHPLKMQSCYEKMESLRLDGLQQRFDVSSTSVFKQRAQIHMREQMDNAVYTFETLLHQELGKGPTKEELCKSIQRVLERVLKKYDYDSSSVRKRFFREALLQISIPFLLKKLAPTCKSELPRFQELIFEDFARFILVENTYEEVVLQTVMKDILQAVKEAAVQRKHNLYRDSMVMHNSDPNLHLLAEGAPIDWGEEYSNSGGGGSPSPSTPESATLSEKRRRAKQVVSVVQDEEVGLPFEASPESPPPASPDGVTEIRGLLAQGLRPESPPPAGPLLNGAPAGESPQPKAAPEASSPPASPLQHLLPGKAVDLGPPKPSDQETGEQVSSPSSHPALHTTTEDSAGVQTEF

SEQ ID NO: 2244 - protein, 70 aa, Homo sapiens
LSFGGISGLLAASRACLVATETSPARLRGHFITIQKCLPLKASVVVFKPQKSHTQDHLTPTLTSVHDAGP

SEQ ID NO: 2245 - protein, 800 aa, Homo sapiens
LKLSRTPALLALALPLAAALAFSDETLDKVPKSEGYCSRILRAQGTRREGYTEFSLRVEGDPDFYKPGTSYRVTLSAAPPSYFRGFTLIALRENREGDKEEDHAGTFQIIDEEETQFMSNCPVAVTESTPRRRTRIQVFWIAPPAGTGCVILKASIVQKRIIYFQDEGSLTKKLCEQDSTFDGVTDKPILDCCACGTAKYRLTFYGNWSEKTHPKDYPRRANHWSAIIGGSHSKNYVLWEYGGYASEGVKQVAELGSPVKMEEEIRQQSDEVLTVIKAKAQWPAWQPLNVRAAPSAEFSVDRTRHLMSFLTMMGPSPDWNVGLSAEDLCTKECGWVQKVVQDLIPWDAGTDSGVTYESPNKPTIPQEKIRPLTSLDHPQSPFYDPEGGSITQVARVVIERIARKGEQCNIVPDNVDDIVADLAPEEKDEDDTPETCIYSNWSPWSACSSSTCDKGKRMRQRMLKAQLDLSVPCPDTQDFQPCMGPGCSDEDGSTCTMSEWITWSPCSISCGMGMRSRERYVKQFPEDGSVCTLPTEETEKCTVNEECSPSSCLMTEWGEWDECSATCGMGMKKRHRMIKMNPADGSMCKAETSQAEKCMMPECHTIPCLLSPWSEWSDCSVTCGKGMRTRQRMLKSLAELGDCNEDLEQVEKCMLPECPIDCELTEWSQWSECNKSCGKGHVIRTRMIQMEPQFGGAPCPETVQRKKCRIRKCLRNPSIQKLRWREARESRRSEQLKEESEGEQFPGCRMRPWTAWSECTKLCGGGIQERYMTVKKRFKSSQFTSCKDKKEIRACNVHPC

SEQ ID NO: 2246 - protein, 759 aa, Homo sapiens
IAMLLRLLLAWAAAGPTLGQDPWAAEPRAACGPSSCYALFPRRRTFLEAWRACRELGGDLATPRTPEEAQRVDSLVGAGPASRLLWIGLQRQARQCQLQRPLRGFTWTTGDQDTAFTNWAQPASGGPCPAQRCVALEASGEHRWLEGSCTLAVDGYLCQFGFEGACPALQDEAGQAGPAVYTTPFHLVSTEFEWLPFGSVAAVQCQAGRGASLLCVKQPEGGVGWSRAGPLCLGTGCSPDNGGCEHECVEEVDGHVSCRCTEGFRLAADGRSCEDPCAQAPCEQQCEPGGPQGYSCHCRLGFRPAEDDPHRCVDTDECQIAGVCQQMCVNYVGGFECYCSEGHELEADGISCSPAGAMGAQASQDLGDELLDDGEDEEDEDEAWKAFNGGWTEMPGILWMEPTQPPDFALAYRPSFPEDREPQIPYPEPTWPPPLSAPRVPYHSSVLSVTRPVVVSATHPTLPSAHQPPVIPATHPALSRDHQIPVIAANYPDLPSAYQPGILSVSHSAQPPAHQPPMISTKYPELFPAHQSPMFPDTRVAGTQTTTHLPGIPPNHAPLVTTLGAQLPPQAPDALVLRTQATQLPIIPTAQPSLTTTSRSPVSPAHQISVPAATQPAALPTLLPSQSPTNQTSPISPTHPHSKAPQIPREDGPSPKLALWLPSPAPTAAPTALGEAGLAEHSQRDDRWLLVALLVPTCVFLVVLLALGIVYCTRCGPHAPNKRITDCYRWVIHAGSKSPTEPMPPRGSLTGVQTCRTSV

SEQ ID NO: 2247 - protein, 35 aa, Homo sapiens
IKNMITGTSQADCAVLIFAAGVGEFEAGISKNGQT

SEQ ID NO: 2248 - protein, 34 aa, Homo sapiens
LAFTFLILFLGNFLTTLKVVHAKLQKNRGKTKQP

SEQ ID NO: 2249 - protein, 166 aa, Homo sapiens
LSCPFLRTCSEAEEPVLEEMVMGLGVLLLVFVLGLGLTPPTLAQDNSRYTHFLTQHYDAKPQGRDDRYCESIMRRRGLTSPCKDINTFIHGNKRSIKAICENKNGNPHRENLRISKSSFQVTTCKLHGGSPWPPCQYRATAGFRNVVVACENGLPVHLDQSIFRRP

SEQ ID NO: 2250 - protein, 211 aa, Homo sapiens
LALGLLLLATLLRPADACSCSPVHPQQAFCNADVVIRAKAVSEKEVDSGNDIYGNPIKRIQYEIKQIKMFKGPEKDIEFIYTAPSSAVCGVSLDVGGKKEYLIAGKAEGDGKMHITLCDFIVPWDTLSTTQKKSLNHRYQMGCECKITRCPMIPCYISSPDECLWMDWVTEKNINGHQAKFFACIKRSDGSCAWYRGAAPPKQEFLDIEDP

SEQ ID NO: 2251 - protein, 1451 aa, Homo sapiens
RGLGTCLATLAGLLLTAAGETFSGGCLFDEPYSTCGYSQSEGDDFNWEQVNTLTKPTSDPWMPSGSFMLVNASGRPEGQRAHLLLPQLKENDTHCIDFHYFVSSKSNSPPGLLNVYVKVNNGPLGNPIWNISGDPTRTWNRAELAISTFWPNFYQVIFEVITSGHQGYLAIDEVKVLGHPCTRTPHFLRIQNVEVNAGQFATFQCSAIGRTVAGDRLWLQGIDVRDAPLKEIKVTSSRRFIASFNVVNTTKRDAGKYRCMIRTEGGVGISNYAELVVKEPPVPIAPPQLASVGATYLWIQLNANSINGDGPIVAREVEYCTASGSWNDRQPVDSTSYKIGHLDPDTEYEISVLLTRPGEGGTGSPGPALRTRTKCADPMRGPRKLEVVEVKSRQITIRWEPFGYNVTRCHSYNLTVHYCYQVGGQEQVREEVSWDTENSHPQHTITNLSPYTNVSVKLILMNPEGRKESQELIVQTDEDLPGAVPTESIQGSTFEEKIFLQWREPTQTYGVITLYEITYKAVSSFDPEIDLSNQSGRVSKLGNETHFLFFGLYPGTTYSFTIRASTAKGFGPPATNQFTTKISAPSMPAYELETPLNQTDNTVTVMLKPAHSRGAPVSVYQIVVEEERPRRTKKTTEILKCYPVPIHFQNASLLNSQYYFAAEFPADSLQAAQPFTIGDNKTYNGYWNTPLLPYKSYRIYFQAASRANGETKIDCVQVATKGAATPKPVPEPEKQTDHTVKIAGVIAGILLFVIIFLGVVLVMKKRKLAKKRKETMSSTRQEMTVMVNSMDKSYAEQGTNCDEAFSFMDTHNLNGRSVSSPSSFTMKTNTLSTSVPNSYYPDETHTMASDTSSLVQSHTYKKREPADVPYQTGQLHPAIRVADLLQHITQMKCAEGYGFKEEYESFFEGQSAPWDSAKKDENRMKNRYGNIIAYDHSRVRLQTIEGDTNSDYINGNYIDGYHRPNHYIATQGPMQETIYDFWRMVWHENTASIIMVTNLVEVGRVKCCKYWPDDTEIYKDIKVTLIETELLAEYVIRTFAVEKRGVHEIREIRQFHFTGWPDHGVPYHATGLLGFVRQVKSKSPPSAGPLVVHCSAGAGRTGCFIVIDIMLDMAEREGVVDIYNCVRELRSRRVNMVQTEEQYVFIHDAILEACLCGDTSVPASQVRSLYYDMNKLDPQTNSSQIKEEFRTLNMVTPTLRVEDCSIALLPRNHEKNRCMDILPPDRCLPFLITIDGESSNYINAALMDSYKQPSAFIVTQHPLPNTVKDFWRLVLDYHCTSVVMLNDVDPAQLCPQYWPENGVHRHGPIQVEFVSADLEEDIISRIFRIYNAARPQDGYRMVQQFQFLGWPMYRDTPVSKRSFLKLIRQVDKWQEEYNGGEGRTVVHCLNGGGRSGTFCAISIVCEMLRHQRTVDVFHAVKTLRNNKPNMVDLLDQYKFCYEVALEYLNSG

SEQ ID NO: 2252 - protein, 1739 aa, Homo sapiens
LGQPRAGLCLLLAALQLLPGTQADPVDVLKALGVQGGQAGVPEGPGFCPQRTPEGDRAFRIGQASTLGIPTWELFPEGHFPENFSLLITLRGQPANQSVLLSIYDERGARQLGLALGPALGLLGDPFRPLPQQVNLTDGRWHRVAVSIDGEMVTLVADCEAQPPVLGHGPRFISIAGLTVLGTQDLGEKTFEGDIQELLISPDPQAAFQACERYLPDCDNLAPAATVAPQGEPETPRPRRKGKGKGRKKGRGRKGKGRKKNKEIWTSSPPPDSAENQTSTDIPKTETPAPNLPPTPTPLVVTSTVTTGLNATILERSLDPDSGTELGTLETKAAREDEEGDDSTMGPDFRAAEYPSRTQFQIFPGAGEKGAKGEPAVIEKGQQFEGPPGAPGPQGVVGPSGPPGPPGFPGDPGPPGPAGLPGIPGIDGIRGPPGTVIMMPFQFAGGSFKGPPVSFQQAQAQAVLQQTQLSMKGPPGPVGLTGRPGPVGLPGHPGLKGEEGAEGPQGPRGLQGPHGPPGRVGKMGRPGADGARGLPGDTGPKGDRGFDGLPGLPGEKGQRGDFGHVGQPGPPGEDGERGAEGPPGPTGQAGEPGPRGLLGPRGSPGPTGRPGVTGIDGAPGAKGNVGPPGEPGPPGQQGNHGSQGLPGPQGLIGTPGEKGPPGNPGIPGLPGSDGPLGHPGHEGPTGEKGAQGPPGSAGPPGYPGPRGVKGTSGNRGLQGEKGEKGEDGFPGFKGDVGLKGDQGKPGAPGPRGEDGPEGPKGQAGQAGEEGPPGSAGEKGKLGVPGLPGYPGRPGPKGSIGFPGPLGPIGEKGKSGKTGQPGLEGERGPPGSRGERGQPGATGQPGPKGDVGQDGAPGIPGEKGLPGLQGPPGFPGPKGPPGHQGKDGRPGHPGQRGELGFQGQTGPPGPAGVLGPQGKTGEVGPLGERGPPGPPGPPGEQGLPGLEGREGAKGELGPPGPLGKEGPAGLRGFPGPKGGPGDPGPTGLKGDKGPPGPVGANGSPGERGPLGPAGGIGLPGQSGSEGPVGPAGKKGSRGERGPPGPTGKDGIPGPLGPLGPPGAAGPSGEEGDKGDVGAPGHKGSKGDKGDAGPPGQPGIRGPAGHPGPPGADGAQGRRGPPGLFGQKGDDGVRGFVGVIGPPGLQGLPGPPGEKGEVGDVGSMGPHGAPGPRGPQGPTGSEGTPGLPGGVGQPGAVGEKGERGDAGDPGPPGAPGIPGPKGDIGEKGDSGPSGAAGPPGKKGPPGEDGAKGSVGPTGLPGDLGPPGDPGVSGIDGSPGEKGDPGDVGGPGPPGASGEPGAPGPPGKRGPSGHMGREGREGEKGAKGEPGPDGPPGRTGPMGARGPPGRVGPEGLRGIPGPVGEPGLLGAPGQMGPPGPLGPSGLPGLKGDTGPKGEKGHIGLIGLIGPPGEAGEKGDQGLPGVQGPPGPKGDPGPPGPIGSLGHPGPPGVAGPLGQKGSKGSPGSMGPRGDTGPAGPPGPPGAPAELHGLRRRRRFVPVPLPVVEGGLEEVLASLTSLSLELEQLRRPPGTAERPGLVCHELHRNHPHLPDGEYWIDPNQGCARDSFRVFCNFTAGGETCLYPDKKFEIVKLASWSKEKPGGWYSTFRRGKKFSYVDADGSPVNVVQLNFLKLLSATARQNFTYSCQNAAAWLDEATGDYSHSARFLGTNGEELSFNQTTAATVSVPQDGCRLRKGQTKTLFEFSSSRAGFLPLWDVAATDFGQTNQKFGFELGPVCFSS

SEQ ID NO: 2253 - protein, 150 aa, Homo sapiens
TLGAMPSKGPLQSVQVFGRKKTATAVAHCKRGNGLIKVNGRPLEMIEPRTLQYKLLEPVLLLGKERFAGVDIRVRVKGGGHVAQIYAIRQSISKALVAYYQKYVDEASKKEIKDILIQYDRTLLVADPRRCESKKFGGPGARARYQKSYR

SEQ ID NO: 2254 - protein, 145 aa, Homo sapiens
LLRGSERCLCLTLISVMSGRGKQGGKARAKAKSRSSRAGLQFPVGRVHRLLRKGNYAERVGAGAPVYMAAVLEYLTAEILELAGNAARDNKKTRIIPRHLQLAIRNDEELNKLLGKVTIAQGGVLPNIQAVLLPKKTESHKAKSK

SEQ ID NO: 2255 - protein, 32 aa, Homo sapiens
RQRFLGFCLVLSLQKVLPVPPALGTRLCIASP

SEQ ID NO: 2256 - protein, 32 aa, Homo sapiens [sequence omitted]

SEQ ID NO: 2257 - protein, 42 aa, Homo sapiens
LVVVGVLLIILIVLLVVFLPQSSDSSSAPRTQDAGIASGPGN

SEQ ID NO: 2258 - protein, 63 aa, Homo sapiens
LRRYTRAEYESEAEGVMGGEIQPVSVKVGDKVLLPEYGGTKVVLDDKDYFLFRDGDILGKYVD

SEQ ID NO: 2259 - protein, 247 aa, Homo sapiens
VGRPQFARSLSAAPQLSDTADTMGFGDLKSPAGLQVLNDYLADKSYIEGYVPSQADVAVFEAVSSPPPADLCHALRWYNHIKSYEKEKASLPGVKKALGKYGPADVEDTTGSGATDSKDDDDIDLFGSDDEEESEEAKRLREERLAQYESKKAKKPALVAKSSILLDVKPWDDETDMAKLEECVRSIQADGLVWGSSKLVPVGYGIKKLQIQCVVEDDKVGTDMLEEQITAFEDYVQSMDVAAFNKI

SEQ ID NO: 2260 - protein, 464 aa, Homo sapiens
RVPLTEACKDSRIGGMMKTLLLFVGLLLTWESGQVLGDQTVSDNELQEMSNQGSKYVNKEIQNAVNGVKQIKTLIEKTNEERKTLLSNLEEAKKKKEDALNETRESETKLKELPGVCNETMMALWEECKPCLKQTCMKFYARVCRSGSGLVGRQLEEFLNQSSPFYFWMNGDRIDSLLENDRQQTHMLDVMQDHFSRASSIIDELFQDRFFTREPQDTYHYLPFSLPHRRPHFFFPKSRIVRSLMPFSPYEPLNFHAMFQPFLEMIHEAQQAMDIHFHSPAFQHPPTEFIREGDDDRTVCREIRHNSTGCLRMKDQCDKCREILSVDCSTNNPSQAKLRRELDESLQVAERLTRKYNELLKSYQWKMLNTSSLLEQLNEQFNWVSRLANLTQGEDQYYLRVTTVASHTSDSDVPSGVTEVVVKLFDSDPITVTVPVEVSRKNPKFMETVAEKALQEYRKKHREE

SEQ ID NO: 2261 - protein, 147 aa, Homo sapiens
IYTHQSDVWSFGVLLWEIFTLGGSPYPGVPVEELFKLLKEGHRMDKPSNCTNELYMMMRDCWHAVPSQRPTFKQLVEDLDRIVALTSNQEYLDLSMPLDQYSPSFPDTRSSTCSSGEDSVFSHEPLPEEPCLPRHPAQLANGGLKRR

SEQ ID NO: 2262 - protein, 358 aa, Homo sapiens
VENTDPECYWLTNWIETILVQSWYPITVATNSREQKKILAKYLLETSGNLDGLEYKLHDFGYRGVSSQETAGIGASAHLVNFKGTDTVAGLALNKKYYGTKDPVPGYSVPAAEHSTITAWGKDHEKDAFEHIVTQFSSVPVSVVSNSYDIYNACEKIWGEDLRHLIVSRSTQAPLIIRPDSGNPLDTVLKVLEILGKKFPVTENSKGYKLLPPYLRVIQGDGVDINTLQEIVEGMKQKMWSIENIAFGSGGGLLQKLTRDLLNCSFKCSYVVTNGLGINVFKDPVADPNKRSKKGRLSLHRTPAGNFVTLEEGKGDLEEYGQDLLHTVFKNGKVTKSYSFDEIRKNAQLNIELEAAHH

SEQ ID NO: 2263 - protein, 12 aa, Homo sapiens
IVVMVLFSLFVD

SEQ ID NO: 2264 - protein, 229 aa, Homo sapiens
LPQGPRRRSSAAQPPPPPPPLLSRRHDDRVHLAGAPELPPGLRGRHQPPDQPGALRLLRLPVHDRHSYLSLGIPSITHSVFPFQSYYFDRDDVALKNFAKYFLHQSHEEREHAEKLMKLQNQRGGRIFLQDIKKPDCDDWESGLNAMECALHLEKNVNQSLLELHKLATDKNDPHLCDFIETHYLNEQVKAIKELGDHVTNLRKMGAPESGLAEYLFDKHTLGDSDNES

SEQ ID NO: 2265 - protein, 413 aa, Homo sapiens
LRREIRPGLPESEPRPPRPPAALTADQPPPRRLSESRGGGGMSEAGEATTTTTTTLPQAPTEAAAAAPQDPAPKSPVGSGAPQAAAPAPAAHVAGNPGGDAAPAATGTAAAASLATAAGSEDAEKKVLATKVLGTVKWFNVRNGYGFINRNDTKEDVFVHQTAIKKNNPRKYLRSVGDGETVEFDVVEGEKGAEAANVTGPDGVPVEGSRYAADRRRYRRGYYGRRRGPPRNYAGEEEEEGSGSSEGFDPPATDRQFSGARNQLRRPQYRPQYRQRRFPPYHVGQTFDRRSRVLPHPNRIQAGEIGEMKDGVPEGAQLQGPVHRNPTYRPRYRSRGPPRPRPAPAVGEAEDKENQQATSGPNQPSVRRGYRRPYNYRRRPRPPNAPSQDGKEAKAGEAPTENPAPPTQQSSAE

SEQ ID NO: 2266 - protein, 18 aa, Homo sapiens
ICSRRRLLLLPLLLPLPP

SEQ ID NO: 2267 - protein, 136 aa, Homo sapiens
RPSLHPATSTASGSASPTLARAMASVSELACIYSALILHDDEVTVTEDKINALIKAAGVNVEPFWPGLFAKALANVNIGSLICNVGAGGPAPAAGAAPAGGPAPSTAAAPAEEKKVEAKKEESEESDDDMGFGLFD

SEQ ID NO: 2268 - protein, 34 aa, Homo sapiens
IVCPLSRTSTLSTPLLMQVRVMTCFLLALRIISI

SEQ ID NO: 2269 - protein, 29 aa, Homo sapiens
IILAKDFAIYFSAFSGRISLLPEGLGRAL

SEQ ID NO: 2270 - protein, 139 aa, Homo sapiens
LDSIMACGLVASNLNLKPGECLRVRGEVAPDAKSFVLNLGKDSNNLCLHFNPRFNAHGDANTIVCNSKDGGAWGTEQREAVFPFQPGSVAEVCITFDQANLTVKLPDGYEFKFPNRLNLEAINYMAADGDFKIKCVAFD

SEQ ID NO: 2271 - protein, 53 aa, Homo sapiens
ICGRVPMSLLLPPLALLLLLAALVAPATAATAYRPDWNRLSGLTRARVETCGG

SEQ ID NO: 2272 - protein, 395 aa, Homo sapiens
LLGALLAAAAAAAVRVCARHAEAQAAARQELALKTLGTDGLFLFSSLDTDGDMYISPEEFKPIAEKLTGSTPAASCEEEELPPDPSEETLTIEARFQPLLPETMTKSKDGFLGVSRLALSGLRNWTAAASPSAVFATRHFQPFLPPPGQELGEPWWIIPSELSMFTGYLSNNRFYPPPPKGKEVIIHRLLSMFHPRPFVKTRFAPQGAVACLTAISDFYYTVMFRIHAEFQLSEPPDFPFWFSPAQFTGHIILSKDATHVRDFRLFVPNHRSLNVDMEWLYGASESSNMEVDIGYIPQMELEATGPSVPSVILDEDGSMIDSHLPSGEPLQFVFEEIKWQQELSWEEAARRLEVAMYPFKKVSYLPFTEAFDRAKAENKLVHSILLWGALDDQSC

SEQ ID NO: 2273 - protein, 422 aa, Homo sapiens
LVISSVFFSSLLLSRFSMQEKDASSQGFLPHFQHFATQAIHVGQDPEQWTSRAVVPPISLSTTFKQGAPGQHSGFEYSRSGNPTRNCLEKAVAALDGAKYCLAFASGLAATVTITHLLKAGDQIICMDDVYGGTNRYFRQVASEFGLKISFVDCSKIKLLEAAITPETKLVWIETPTNPTQKVIDIEGCAHIVHKHGDIILVVDNTFMSPYFQRPLALGADISMYSATKYMNGHSDVVMGLVSVNCESLHNRLRFLQNSLGAVPSPIDCYLCNRGLKTLHVRMEKHFKNGMAVAQFLESNPWVEKVIYPGLPSHPQHELVKRQCTGCTGMVTFYIKGTLQHAEIFLKNLKLFTLAESLGGFESLAELPAIMTHASVLKNDRDVLGISDTLIRLSVGLEDEEDLLEDLDQALKAAHPPSGSHS

SEQ ID NO: 2274 - protein, 1235 aa, Homo sapiens
LAWTMVLLWEPAGAWLALGLALALGPSVAAAAPRQDCTGVECPPLENCIEEALEPGACCATCVQQGCACEGYQYYDCLQGGFVRGRVPAGQSYFVDFGSTECSCPPGGGKISCQFMLCPELPPNCIEAVVVADSCPQCGQVGCVHAGHKYAAGHTVHLPPCRACHCPDAGGELICYQLPGCHGNFSDAEEGDPERHYEDPYSYDQEVAEVEAATALGGEVQAGAVQAGAGGPPAALGGGSQPLSTIQAPPWPAVLPRPTAAAALGPPAPVQAKARRVTEDSEEEEEEEEEREEMAVTEQLAAGGHRGLDGLPTTAPAGPSLPIQEERAEAGARAEAGARPEENLILDAQATSRSTGPEGVTHAPSLGKAALVPTQAVPGSPRDPVKPSPHNILSTSLPDAAWIPPTREVPRKPQVLPHSHVEEDTDPNSVHSIPRSSPEGSTKDLIETCCAAGQQWAIDNDECLEIPESGTEDNVCRTAQRHCCVSYLQEKSCMAGVLGAKEGETCGAEDNDSCGISLYKQCCDCCGLGLRVRAEGQSCESNPNLGYPCNHVMLSCCEGEEPLIVPEVRRPPEPAAAPRRVSEAEMAGREALSLGTEAELPNSLPGDDQDECLLLPGELCQHLCINTVGSYHCACFPGFSLQDDGRTCRPEGHPPQPEAPQEPALKSEFSQVASNTIPLPLPQPNTCKDNGPCKQVCSTVGGSAICSCFPGYAIMADGVSCEDQDECLMGAHDCSRRQFCVNTLGSFYCVNHTVLCADGYILNAHRKCVDINECVTDLHTCSRGEHCVNTLGSFHCYKALTCEPGYALKDGECEDVDECAMGTHTCQPGFLCQNTKGSFYCQARQRCMDGFLQDPEGNCVDINECTSLSEPCRPGFSCINTVGSYTCQRNPLICARGYHASDDGTKCVDVNECETGVHRCGEGQVCHNLPGSYRCDCKAGFQRDAFGRGCIDVNECWASPGRLCQHTCENTLGSYRCSCASGFLLAADGKRCEDVNECEAQRCSQECANIYGSYQCYCRQGYQLAEDGHTCTDIDECAQGAGILCTFRCLNVPGSYQCACPEQGYTMTANGRSCKDVDECALGTHNCSEAETCHNIQGSFRCLRFECPPNYVQVSKTKCERTTCHDFLECQNSPARITHYQLNFQTGLLVPAHIFRIGPAPAFTGDTIALNIIKGNEEGYFGTRRLNAYTGVVYLQRAVLEPRDFALDVEMKLWRQGSVTTFLAKMHIFFTTFAL

SEQ ID NO: 2275 - protein, 11 aa, Homo sapiens
RVKLAEQEDGR

SEQ ID NO: 2276 - protein, 534 aa, Homo sapiens
LETAVLYPSHSSFTMPGSLPLNAEACWPKDVGIVALEIYFPSQYVDQAELEKYDGVDAGKYTIGLGQAKMGFCTDREDINSLCMTVVQNLMERNNLSYDCIGRLEVGTETIIDKSKSVKTNLMQLFEESGNTDIEGIDTTNACYGGTAAVFNAVNWIESSSWDGRYALVVAGDIAVYATGNARPTGGVGAVALLIGPNAPLIFERGLRGTHMQHAYDFYKPDMLSEYPIVDGKLSIQCYLSALDRCYSVYCKKIHAQWQKEGNDKDFTLNDFGFMIFHSPYCKLVQKSLARMLLNDFLNDQNRDKNSIYSGLEAFGDVKLEDTYFDRDVEKAFMKASSELFSQKTKASLLVSNQNGNMYTSSVYGSLASVLAQYSPQQLAGKRIGVFSYGSGLAATLYSLKVTQDATPGSALDKITASLCDLKSRLDSRTGVAPDVFAENMKLREDTHHLVNYIPQGSIDSLFEGTWYLVRVDEKHRRTYARRPTPNDDTLDEGVGLVHSNIATEHIPSPAKKVPRLPATAAEPEAAVISNGEH

SEQ ID NO: 2277 - protein, 676 aa, Homo sapiens
VLSFRRSEGLSSCRGSRPPFPAPSLRAEPTEQGTGMAKAAAIGIDLGTTYSCVGVFQHGKVEIIANDQGNRTTPSYVAFTDTERLIGDAAKNQVALNPQNTVFDAKRLIGRKFGDPVVQSDMKHWPFQVINDGDKPKVQVSYKGETKAFYPEEISSMVLTKMKEIAEAYLGYPVTNAVITVPAYFNDSQRQATKDAGVIAGLNVLRIINEPTAAAIAYGLDRTGKGERNVLIFDLGGGTFDVSILTIDDGIFEVKATAGDTHLGGEDFDNRLVNHFVEEFKRKHKKDISQNKRAVRRLRTACERAKRTLSSSTQASLEIDSLFEGIDFYTSITRARFEELCSDLFRSTLEPVEKALRDAKLDKAQIHDLVLVGGSTRIPKVQKLLQDFFNGRDLNKSINPDEAVAYGAAVQAAILMGDKSENVQDLLLLDVAPLSLGLETAGGVMTALIKRNSTIPTKQTQIFTTYSDNQPGVLIQVYEGERAMTKDNNLLGRFELSGIPPAPRGVPQIEVTFDIDANGILNVTATDKSTGKANKITITNDKGRLSKEEIERMVQEAEKYKAEDEVQRERVSAKNALESYAFNMKSAVEDEGLKGKISEADKKKVLDKCQEVISWLDANTLAEKDEFEHKRKELEQVCNPIISGLYQGAGGPGPGGFGAQGPKGGSGSGPTIEEVD

SEQ ID NO: 2278 - protein, 56 aa, Homo sapiens
RRVCVLAFILLSWEPTAGGSFSGSLGGRWMGSRGPRGTGPGKRRRRRRRSRSPGEA

SEQ ID NO: 2279 - protein, 1179 aa, Homo sapiens
IMPKKKRLSAGRVPLILFLCQMISALEVPLDLVQPPTITQQSPKDYIIDPRENIVIQCEAKGKPPPSFSWTRNGTHFDIDKDPLVTMKPGTGTLIINIMSEGKAETYEGVYQCTARNERGAAVSNNIVVRPSRSPLWTKEKLEPITLQSGQSLVLPCRPPIGLPPPIIFWMDNSFQRLPQSERVSQGLNGDLYFSNVLPEDTREDYICYARFNHTQTIQQKQPISVKVISVDELNDTIAANLSDTEFYGAKSSRERPPTFLTPEGNASNKEELRGNVLSLECIAEGLPTPIIYWAKEDGMLPKNRTVYKNFEKTLQIIHVSEADSGNYQCIAKNALGAIHHTISVRVKAAPYWITAPQNLVLSPGEDGTLICRANGNPKPRISWLTNGVPIEIAPDDPSRKIDGDTIIFSNVQERSSAVYQCNASNEYGYLLANAFVNVLAEPPRILTPANTLYQVIANRPALLDCAFFGSPLPTIEWFKGAKGSALHEDIYVLHENGTLEIPVAQKDSTGTYTCVARNKLGMAKNEVHLEIKDPTWIVKQPEYAVVQRGSMVSFECKVKHDHTLSLTVLWLKDNRELPSDERFTVDKDHLVVADVSDDDSGTYTCVANTTLDSVSASAVLSVVDVPNPPFDLELTDQLDKSVQLSWTPGDDNNSPITKFIIEYEDAMHKPGLWHHQTEVSGTQTTAQLKLSPYVNYSFRVMAVNSIGKSLPSEASEQYLTKASEPDKNPTAVEGLGSEPDNLVITWKPLNGFESNGPGLQYKVSWRQKDGDDEWTSVVVANVSKYIVSGTPTFVPYLIKVQALNDMGFAPEPAVVMGHSGEDLPMVAPGNVRVNVVNSTLAEVHWDPVPLKSIRGHLQGYRIYYWKTQSSSKRNRRHIEKKILTFQGSKTHGMLPGLEPFSHYTLNVRVVNGKGEGPASPDRVFNTPEGVPSAPSSLKIVNPTLDSLTLEWDPPSHPNGILTEYTLKYQPINSTHELGPLVDLKIPANKTRWTLKNLNFSTRYKFYFYAQTSAGSGSQITEEAVTTVDEAMASRQVDIATQGWFIGLMCAVALLILILLIVCFIRRNKGGKYPVKEKEDAHADPEIQPMKEDDGTFGEYSDAEDHKPLKKGSRTPSDRTVKKEDSDDSLVDYGEGVNGQFNEDGSFIGQYSGKKEKEPAEGNESSEAPSPVNAMNSFV

SEQ ID NO: 2280 - protein, 452 aa, Homo sapiens
IGGMMKTLLLFVGLLLTWESGQVLGDQTVSDNELQEMSNQGSKYVNKEIQNAVNGVKQIKTLIEKTNEERKTLLSNLEEAKKKKEDALNETRESETKLKELPGVCNETMMALWEECKPCLKQTCMKFYARVCRSGSGLVGRQLEEFLNQSSPFYFWMNGDRIDSLLENDRQQTHMLDVMQDHFSRASSIIDELFQDRFFTREPQDTYHYLPFSLPHRRPHFFFPKSRIVRSLMPFSPYEPLNFHAMFQPFLEMIHEAQQAMDIHFHSPAFQHPPTEFIREGDDDRTVCREIRHNSTGCLRMKDQCDKCREILSVDCSTNNPSQAKLRRELDESLQVAERLTRKYNELLKSYQWKMLNTSSLLEQLNEQFNWVSRLANLTQGEDQYYLRVTTVASHTSDSDVPSGVTEVVVKLFDSDPITVTVPVEVSRKNPKFMETVAEKALQEYRKKHREE

SEQ ID NO: 2281 - protein, 776 aa, Homo sapiens
TADSPEAEPPRRARVSLKRRIELTVEYPWRCGALSPTSNCRTGMWSWKCLLFWAVLVTATLCTARPSPTLPEQDALPSSEDDDDDDDSSSEEKETDNTKPNRMPVAPYWTSPEKMEKKLHAVPAAKTVKFKCPSSGTPNPTLRWLKNGKEFKPDHRIGGYKVRYATWSIIMDSVVPSDKGNYTCIVENEYGSINHTYQLDVVERSPHRPILQAGLPANKTVALGSNVEFMCKVYSDPQPHIQWLKHIEVNGSKIGPDNLPYVQILKTAGVNTTDKEMEVLHLRNVSFEDAGEYTCLAGNSIGLSHHSAWLTVLEALEERPAVMTSPLYLEIIIYCTGAFLISCMVGSVIVYKMKSGTKKSDFHSQMAVHKLAKSIPLRRQVTVSADSSASMNSGVLLVRPSRLSSSGTPMLAGVSEYELPEDPRWELPRDRLVLGKPLGEGCFGQVVLAEAIGLDKDKPNRVTKVAVKMLKSDATEKDLSDLISEMEMMKMIGKHKNIINLLGACTQDGPLYVIVEYASKGNLREYLQARRPPGLEYCYNPSHNPEEQLSSKDLVSCAYQVARGMEYLASKKCIHRDLAARNVLVTEDNVMKIADFGLARDIHHIDYYKKTTNGRLPVKWMAPEALFDRIYTHQSDVWSFGVLLWEIFTLGGSPYPGVPVEELFKLLKEGHRMDKPSNCTNELYMMMRDCWHAVPSQRPTFKQLVEDLDRIVALTSNQEYLDLSMPLDQYSPSFPDTRSSTCSSGEDSVFSHEPLPEEPCLPRHPAQLANGGLKRR

SEQ ID NO: 2282 - protein, 650 aa, Homo sapiens
LGGQNFLGVIFFGFSSSFIFLPKLLLVGEKKMPQLNGGGGDDLGANDELISFKDEGEQEEKSSENSSAERDLADVKSSLVNESETNQNSSSDSEAERRPPPRSESFRDKSRESLEEAAKRQDGGLFKGPPYPGYPFIMIPDLTSPYLPNGSLSPTARTLHFQSGSTHYSAYKTIEHQIAVQYLQMKWPLLDVQAGSLQSRQALKDARSPSPAHIVSNKVPVVQHPHHVHPLTPLITYSNEHFTPGNPPPHLPADVDPKTGIPRPPHPPDISPYYPLSPGTVGQIPHPLGWLVPQQGQPVYPITTGGFRHPYPTALTVNASMSRFPPHMVPPHHTLHTTGIPHPAIVTPTVKQESSQSDVGSLHSSKHQDSKKEEEKKKPHIKKPLNAFMLYMKEMRAKVVAECTLKESAAINQILGRRWHALSREEQAKYYELARKERQLHMQLYPGWSARDNYGKKKKRKRDKQPGETNEHSECFLNPCLSLPPITDLSAPKKCRARFGLDQQNNWCGPCRRKKKCVRYIQGEGSCLSPPSSDGSLLDSPPPSPNLLGSPPRDAKSQTEQTQPLSLSLKPDPLAHLSMMPPPPALLLAEATHKASALCPNGALDLPPAALQPAAPSSSIAQPSTSSLHSHSSLAGTQPQPLSLVTKSLE

SEQ ID NO: 2283 - protein, 424 aa, Homo sapiens
KYLKGKVVTKEKIQEAKDVYKEHFQDDVVNEKGWNYILEKYDGHLPIEIKAVPEGFVIPRGNVLFTVENTDPECYWLTNWIETILVQSWYPITVATNSREQKKILAKYLLETSGNLDGLEYKLHDFGYRGVSSQETAGIGASAHLVNFKGTDTVAGLALNKKYYGTKDPVPGYSVPAAEHSTITAWGKDHEKDAFEHIVTQFSSVPVSVVSNSYDIYNACEKIWGEDLRHLIVSRSTQAPLIIRPDSGNPLDTVLKVLEILGKKFPVTENSKGYKLLPPYLRVIQGDGVDINTLQEIVEGMKQKMWSIENIAFGSGGGLLQKLTRDLLNCSFKCSYVVTNGLGINVFKDPVADPNKRSKKGRLSLHRTPAGNFVTLEEGKGDLEEYGQDLLHTVFKNGKVTKSYSFDEIRKNAQLNIELEAAHH

SEQ ID NO: 2284 - protein, 242 aa, Homo sapiens
IASPPSPLHRTLGLPQGPRRRSSAAQPPPPPPPLLSRRHDDRVHLAGAPELPPGLRGRHQPPDQPGALRLLRLPVHDRHSYLSLGIPSITHSVFPFQSYYFDRDDVALKNFAKYFLHQSHEEREHAEKLMKLQNQRGGRIFLQDIKKPDCDDWESGLNAMECALHLEKNVNQSLLELHKLATDKNDPHLCDFIETHYLNEQVKAIKELGDHVTNLRKMGAPESGLAEYLFDKHTLGDSDNES

SEQ ID NO: 2285 - protein, 937 aa, Homo sapiens
LSPAFSQGFLSASRRCPRGSRRLLTGRGCLCVLLSVRGTARPRGPEQNAARAESGGRRSRQGAGGRRPRPEAEADREPAMSVVGLDVGSQSCYIAVARAGGIETIANEFSDRCTPSVISFGSKNRTIGVAAKNQQITHANNTVSNFKRFHGRAFNDPFIQKEKENLSYDLVPLKNGGVGIKVMYMGEEHLFSVEQITAMLLTKLKETAENSLKKPVTDCVISVPSFFTDAERRSVLDAAQIVGLNCLRLMNDMTAVALNYGIYKQDLPSLDEKPRIVVFVDMGHSAFQVSACAFNKGKLKVLGTAFDPFLGGKNFDEKLVEHFCAEFKTKYKLDAKSKIRALLRLYQECEKLKKLMSSNSTDLPLNIECFMNDKDVSGKMNRSQFEELCAELLQKIEVPLYSLLEQTHLKVEDVSAVEIVGGATRIPAVKERIAKFFGKDISTTLNADEAVARGCALQCAILSPAFKVREFSVTDAVPFPISLIWNHDSEDTEGVHEVFSRNHAAPFSKVLTFLRRGPFELEAFYSDPQGVPYPEAKIGRFVVQNVSAQKDGEKSRVKVKVRVNTHGIFTISTASMVEKVPTEENEMSSEADMECLNQRPPENPDTDKNVQQDNSEAGTQPQVQTDAQQTSQSPPSPELTSEENKIPDADKANEKKVDQPPEAKKPKIKVVNVELPIEANLVWQLGKDLLNMYIETEGKMIMQDKLEKERNDAKNAVEEYVYEFRDKLCGPYEKFICEQDHQNFLRLLTETEDWLYEEGEDQAKQAYVDKLEELMKIGTPVKVRFQEAEERPKMFEELGQRLQHYAKIAADFRNKDEKYNHIDESEMKKVEKSVNEVMEWMNNVMNAQAKKSLDQDPVVRAQEIKTKIKELNNTCEPVVTQPKPKIESPKLERTPNGPNIDKKEEDLEDKNNFGAEPPHQNGECYPNEKNSVNMDLD

SEQ ID NO: 2286 - protein, 174 aa, Homo sapiens
LRKARRFYLAYTRLLVFPLFFHEGVFGCNCMKSQWCRPVAMDLGVYQLRHFSISFLSSLLGTENASVRLDNSSSGASVVAIDNKIEQAMDLVKSHLMYAVREEVEVLKEQIKELIEKNSQLEQENNLLKTLASPEQLAQFQAQLQTGSPPATTQPQGTTQPPAQPASQGSGPTA

SEQ ID NO: 2287 - protein, 161 aa, Homo sapiens
LRTCSEAEEPVLEEMVMGLGVLLLVFVLGLGLTPPTLAQDNSRYTHFLTQHYDAKPQGRDDRYCESIMRRRGLTSPCKDINTFIHGNKRSIKAICENKNGNPHRENLRISKSSFQVTTCKLHGGSPWPPCQYRATAGFRNVVVACENGLPVHLDQSIFRRP

SEQ ID NO: 2288 - protein, 1594 aa, Homo sapiens
LGLPVERRRAERARPRPRPPPRPRPAARVPGPGQGKGRGGELSNRNRGKILAPRARPPLPLPAAPDAEWGQGQGRRTQDPVPAPLEPLEFGLLQLLALWGLGLALCCLPVSPRCLGTKAPGPLRPRAPTHRRRGAARPALSTMRGLGTCLATLAGLLLTAAGETFSGGCLFDEPYSTCGYSQSEGDDFNWEQVNTLTKPTSDPWMPSGSFMLVNASGRPEGQRAHLLLPQLKENDTHCIDFHYFVSSKSNSPPGLLNVYVKVNNGPLGNPIWNISGDPTRTWNRAELAISTFWPNFYQVIFEVITSGHQGYLAIDEVKVLGHPCTRTPHFLRIQNVEVNAGQFATFQCSAIGRTVAGDRLWLQGIDVRDAPLKEIKVTSSRRFIASFNVVNTTKRDAGKYRCMIRTEGGVGISNYAELVVKEPPVPIAPPQLASVGATYLWIQLNANSINGDGPIVAREVEYCTASGSWNDRQPVDSTSYKIGHLDPDTEYEISVLLTRPGEGGTGSPGPALRTRTKCADPMRGPRKLEVVEVKSRQITIRWEPFGYNVTRCHSYNLTVHYCYQVGGQEQVREEVSWDTENSHPQHTITNLSPYTNVSVKLILMNPEGRKESQELIVQTDEDLPGAVPTESIQGSTFEEKIFLQWREPTQTYGVITLYEITYKAVSSFDPEIDLSNQSGRVSKLGNETHFLFFGLYPGTTYSFTIRASTAKGFGPPATNQFTTKISAPSMPAYELETPLNQTDNTVTVMLKPAHSRGAPVSVYQIVVEEERPRRTKKTTEILKCYPVPIHFQNASLLNSQYYFAAEFPADSLQAAQPFTIGDNKTYNGYWNTPLLPYKSYRIYFQAASRANGETKIDCVQVATKGAATPKPVPEPEKQTDHTVKIAGVIAGILLFVIIFLGVVLVMKKRKLAKKRKETMSSTRQEMTVMVNSMDKSYAEQGTNCDEAFSFMDTHNLNGRSVSSPSSFTMKTNTLSTSVPNSYYPDETHTMASDTSSLVQSHTYKKREPADVPYQTGQLHPAIRVADLLQHITQMKCAEGYGFKEEYESFFEGQSAPWDSAKKDENRMKNRYGNIIAYDHSRVRLQTIEGDTNSDYINGNYIDGYHRPNHYIATQGPMQETIYDFWRMVWHENTASIIMVTNLVEVGRVKCCKYWPDDTEIYKDIKVTLIETELLAEYVIRTFAVEKRGVHEIREIRQFHFTGWPDHGVPYHATGLLGFVRQVKSKSPPSAGPLVVHCSAGAGRTGCFIVIDIMLDMAEREGVVDIYNCVRELRSRRVNMVQTEEQYVFIHDAILEACLCGDTSVPASQVRSLYYDMNKLDPQTNSSQIKEEFRTLNMVTPTLRVEDCSIALLPRNHEKNRCMDILPPDRCLPFLITIDGESSNYINAALMDSYKQPSAFIVTQHPLPNTVKDFWRLVLDYHCTSVVMLNDVDPAQLCPQYWPENGVHRHGPIQVEFVSADLEEDIISRIFRIYNAARPQDGYRMVQQFQFLGWPMYRDTPVSKRSFLKLIRQVDKWQEEYNGGEGRTVVHCLNGGGRSGTFCAISIVCEMLRHQRTVDVFHAVKTLRNNKPNMVDLLDQYKFCYEVALEYLNSG

SEQ ID NO: 2289 - protein, 511 aa, Homo sapiens
MASFLAFLLLNFRVCLLLLQLLMPHSAQFSVLGPSGPILAMVGEDADLPCHLFPTMSAETMELKWVSSSLRQVVNVYADGKEVEDRQSAPYRGRTSILRDGITAGKAALRIHNVTASDSGKYLCYFQDGDFYEKALVELKVAALGSDLHVDVKGYKDGGIHLECRSTGWYPQPQIQWSNNKGENIPTVEAPVVADGVGLYAVAASVIMRGSSGEGVSCTIRSSLLGLEKTASISIADPFFRSAQRWIAALAGTLPVLLLLLGGAGYFLWQQQEEKKTQFRKKKREQELREMAWSTMKQEQSTRVKLLEELRWRSIQYASRGERHSAYNEWKKALFKPADVILDPKTANPILLVSEDQRSVQRAKEPQDLPDNPERFNWHYCVLGCESFISGRHYWEVEVGDRKEWHIGVCSKNVQRKGWVKMTPENGFWTMGLTDGNKYRTLTEPRTNLKLPKPPKKVGVFLDYETGDISFYNAVDGSHIHTFLDVSFSEALYPVFRILTLEPTALTICPA

SEQ ID NO: 2290 - protein, 459 aa, Homo sapiens
MASFLAFLLLNFRVCLLLLQLLMPHSAQFSVLGPSGPILAMVGEDADLPCHLFPTMSAETMELKWVSSSLRQVVNVYADGKEVEDRQSAPYRGRTSILRDGITAGKAALRIHNVTASDSGKYLCYFQDGDFYEKALVELKVADGVGLYAVAASVIMRGSSGEGVSCTIRSSLLGLEKTASISIADPFFRSAQRWIAALAGTLPVLLLLLGGAGYFLWQQQEEKKTQFRKKKREQELREMAWSTMKQEQSTRVKLLEELRWRSIQYASRGERHSAYNEWKKALFKPADVILDPKTANPILLVSEDQRSVQRAKEPQDLPDNPERFNWHYCVLGCESFISGRHYWEVEVGDRKEWHIGVCSKNVQRKGWVKMTPENGFWTMGLTDGNKYRTLTEPRTNLKLPKPPKKVGVFLDYETGDISFYNAVDGSHIHTFLDVSFSEALYPVFRILTLEPTALTICPA

SEQ ID NO: 2291 - protein, 376 aa, Homo sapiens
MASFLAFLLLNFRVCLLLLQLLMPHSAQFSVLGPSGPILAMVGEDADLPCHLFPTMSAETMELKWVSSSLRQVVNVYADGKEVEDRQSAPYRGRTSILRDGITAGKAALRIHNVTASDSGKYLCYFQDGDFYEKALVELKVAALGSDLHVDVKGYKDGGIHLECRSTGWYPQPQIQWSNNKGENIPTVEAPVVADGVGLYAVAASVIMRGSSGEGVSCTIRSSLLGLEKTASISIADPFFRSAQRWIAALAGTLPVLLLLLGGAGYFLWQQQEEKKTQFRKKKREQELREMAWSTMKQEQSTRVKLLEELRWRSIQYASRGERHSAYNEWKKALFKPGPPIGQTQQQTRGQGSPVALSQESAQRTDSWGPEEGGES

SEQ ID NO: 2292 - protein, 350 aa, Homo sapiens
MASFLAFLLLNFRVCLLLLQLLMPHSAQFSVLGPSGPILAMVGEDADLPCHLFPTMSAETMELKWVSSSLRQVVNVYADGKEVEDRQSAPYRGRTSILRDGITAGKAALRIHNVTASDSGKYLCYFQDGDFYEKALVELKVAALGSDLHVDVKGYKDGGIHLECRSTGWYPQPQIQWSNNKGENIPTVEAPVVADGVGLYAVAASVIMRGSSGEGVSCTIRSSLLGLEKTASISIADPFFRSAQRWIAALAGTLPVLLLLLGGAGYFLWQQQEEKKTQFRKKKREQELREMAWSTMKQEQSTRVKLLEELRWRSIQYASRGERHSAYNEWKKALFKPGEEMLQMRLHFVK

SEQ ID NO: 2293 - protein, 1383 aa, Homo sapiens
MHLRLFCILLAAVSGAEGWGYYGCDEELVGPLYARSLGASSYYSLLTAPRFARLHGISGWSPRIGDPNPWLQIDLMKKHRIRAVATQGSFNSWDWVTRYMLLYGDRVDSWTPFYQRGHNSTFFGNVNESAVVRHDLHFHFTARYIRIVPLAWNPRGKIGLRLGLYGCPYKADILYFDGDDAISYRFPRGVSRSLWDVFAFSFKTEEKDGLLLHAEGAQGDYVTLELEGAHLLLHMSLGSSPIQPRPGHTTVSAGGVLNDQHWHYVRVDRFGRDVNFTLDGYVQRFILNGDFERLNLDTEMFIGGLVGAARKNLAYRHNFRGCIENVIFNRVNIADLAVRRHSRITFEGKVAFRCLDPVPHPINFGGPHNFVQVPGFPRRGRLAVSFRFRTWDLTGLLLFSRLGDGLGHVELTLSEGQVNVSIAQSGRKKLQFAAGYRLNDGFWHEVNFVAQENHAVISIDDVEGAEVRVSYPLLIRTGTSYFFGGCPKPASRWDCHSNQTAFHGCMELLKVDGQLVNLTLVEGRRLGFYAEVLFDTCGITDRCSPNMCEHDGRCYQSWDDFICYCELTGYKGETCHTPLYKESCEAYRLSGKTSGNFTIDPDGSGPLKPFVVYCDIRENRAWTVVRHDRLWTTRVTGSSMERPFLGAIQYWNASWEEVSALANASQHCEQWIEFSCYNSRLLNTAGGYPYSFWIGRNEEQHFYWGGSQPGIQRCACGLDRSCVDPALYCNCDADQPQWRTDKGLLTFVDHLPVTQVVIGDTNRSTSEAQFFLRPLRCYGDRNSWNTISFHTGAALRFPPIRANHSLDVSFYFRTSAPSGVFLENMGGPYCQWRRPYVRVELNTSRDVVFAFDVGNGDENLTVHSDDFEFNDDEWHLVRAEINVKQARLRVDHRPWVLRPMPLQTYIWMEYDQPLYVGSAELKRRPFVGCLRAMRLNGVTLNLEGRANASEGTSPNCTGHCAHPRLPCFHGGRCVERYSYYTCDCDLTAFDGPYCNHDIGGFFEPGTWMRYNLQSALRSAAREFSHMLSRPVPGYEPGYIPGYDTPGYVPGYHGPGYRLPDYPRPGRPVPGYRGPVYNVTGEEVSFSFSTSSAPAVLLYVSSFVRDYMAVLIKDDGTLQLRYQLGTSPYVYQLTTRPVTDGQPHSINITRVYRNLFIQVDYFPLTEQKFSLLVDSQLDSPKALYLGRVMETGVIDPEIQRYNTPGFSGCLSGVRFNNVAPLKTHFRTPRPMTAELAEALRVQGELSESNCGAMPRLVSEVPPELDPWYLPPDFPYYHDEGWVAILLGFLVAFLLLGLVGMLVLFYLQNHRYKGSYHTNEPKAAHEYHPGSKPPLPTSGPAQVPTPTAAPNQAPASAPAPAPTPAPAPGPRDQNLPQILEESRSE

SEQ ID NO: 2294 - protein, 514 aa, Homo sapiens
MGLAGAAGRWWGLALGLTAFFLPGVHSQVVQVNDSMYGFIGTDVVLHCSFANPLPSVKITQVTWQKSTNGSKQNVAIYNPSMGVSVLAPYRERVEFLRPSFTDGTIRLSRLELEDEGVYICEFATFPTGNRESQLNLTVMAKPTNWIEGTQAVLRAKKGQDDKVLVATCTSANGKPPSVVSWETRLKGEAEYQEIRNPNGTVTVISRYRLVPSREAHQQSLACIVNYHMDRFKESLTLNVQYEPEVTIEGFDGNWYLQRMDVKLTCKADANPPATEYHWTTLNGSLPKGVEAQNRTLFFKGPINYSLAGTYICEATNPIGTRSGQVEVNITEFPYTPSPPEHGRRAGPVPTAIIGGVAGSILLVLIVVGGIVVALRRRRHTFKGDYSTKKHVYGNGYSKAGIPQHHPPMAQNLQYPDDSDDEKKAGPLGGSSYEEEEEEEEGGGGGERKVGGPHPKYDEDAKRPYFTVDEAEARQDGYGDRTLGYQYDPEQLDLAENMVSQNDGSFISKKEWYV

SEQ ID NO: 2295 - protein, 106 aa, Homo sapiens
MSPFSATREKSHSWLSTGWFTMVIAVELCDHVHVYGMVPPNYCSQRPRLQRMPYHYYEPKGPDECVTYIQNEHSRKGNHHRFITEKRVFSSWAQLYGITFSHPSWT

SEQ ID NO: 2296 - protein, 335 aa, Homo sapiens
MAPRTLFLLLSGALTLTETWAGSHSMRYFSAAVSRPGRGEPRFIAMGYVDDTQFVRFDSDSACPRMEPRAPWVEQEGPEYWEEETRNTKAHAQTDRMNLQTLRGYYNQSEASSHTLQWMIGCDLGSDGRLLRGYEQYAYDGKDYLALNEDLRSWTAADTAAQISKRKCEAANVAEQRRAYLEGTCVEWLHRYLENGKEMLQRADPPKTHVTHHPVFDYEATLRCWALGFYPAEIILTWQRDGEDQTQDVELVETRPAGDGTFQKWAAVVVPSGEEQRYTCHVQHEGLPEPLMLRWKQSSLPTIPIMGIVAGLVVLAAVVTGAAVAAVLWRKKSSD

SEQ ID NO: 2297 - protein, 142 aa, Homo sapiens
MQVKEVVEKHSQFLGYPITLYLEKEREKEISDGKAEEEKGEKEEENKDDEEKPKIEDVGSDEEDDSGKDKKKKTKKIKEKYIDQEELNKTKPIWTRNTEDITQEEYGEFYKSLTNDWKDHLAVRYFSVEGQLEFRALLFIPP

SEQ ID NO: 2298 - protein, 483 aa, Homo sapiens
MLERHEIHDIQDFYFREMQQNIHDFECQCHNDERNYREIPAIKIKNITGRRDQGDGRNAGNKPVENQLELSFWLHLAELQGFQIERKIYECNQIEKSVTRGSSVSLLQTNLPCVNTSISNIYRNDFMHPSLLTQDQKAYIREKPYKCSDCGKAFNQRSNLTTHQRIHTGQKPHKCDICGKGFRRIANLASHHRIHTGEKPYRCNECGKTFNQTFNLTTHQRIHTGQKPYKCDRCGKGFRQIGNLASHHRIHTGEKPYRCNECGKTFNRMFHLTRHQRIHTGQKPYKCDICGKGFRQIANLASHHRIHTGEKPYKCSDCGKTFNYRSHLTRHQRIHTGQKPYKCDTCGKDFSQNSYLENHQRIHTREKSYRCNECGKTFNKMTNLTTHQRIHTGQKTYKCDICGKGFRQIGNLASHHRIHTGEKPYRCNECGKTFNRMFHLTRHQRIHTGQKPYKCDICGKSFSQNSYLENHQRIHTGEKTYKL

SEQ ID NO: 2299 - protein, 669 aa, Homo sapiens
MTAAAGSAGRAAVPLLLCALLAPGGAYVLDDSDGLGREFDGIGAVSGGGATSRLLVNYPEPYRSQILDYLFKPNFGASLHILKVEIGGDGQTTDGTEPSHMHYALDENYFRGYEWWLMKEAKKRNPNITLIGLPWSFPGWLGKGFDWPYVNLQLTAYYVVTWIVGAKRYHDLDIDYIGIWNERSYNANYIKILRKMLNYQGLQRVKIIASDNLWESISASMLLDAELFKVVDVIGAHYPGTHSAKDAKLTGKKLWSSEDFSTLNSDMGAGCWGRILNQNYINGYMTSTIAWNLVASYYEQLPYGRCGLMTAQEPWSGHYVVESPVWVSAHTTQFTQPGWYYLKTVGHLEKGGSYVALTDGLGNLTIIIETMSHKHSKCIRPFLPYFNVSQQFATFVLKGSFSEIPELQVWYTKLGKTSERFLFKQLDSLWLLDSDGSFTLSLHEDELFTLTTLTTGRKGSYPLPPKSQPFPSTYKDDFNVDYPFFSEAPNFADQTGVFEYFTNIEDPGEHHFTLRQVLNQRPITWAADASNTISIIGDYNWTNLTIKCDVYIETPDTGGVFIAGRVNKGGILIRSARGIFFWIFANGSYRVTGDLAGWIIYALGRVEVTAKKWYTLTLTIKGHFTSGMLNDKSLWTDIPVNFPKNGWAAIGTHSFEFAQFDNFLVEATR

SEQ ID NO: 2300 - protein, 49 aa, Homo sapiens
MQVSTAALAVLLCTMALCNQFSASRESEFRCGYHHSLAMVRPHQSFLVA

SEQ ID NO: 2301 - protein, 1933 aa, Homo sapiens
MGLLVVLLVGGCAAEEPPRFIKEPKDQIGVSGGVASFVCQATGDPKPRVTWNKKGKKVNSQRFETIEFDESAGAVLRIQPLRTPRDENVYECVAQNSVGEITVHAKLTVLREDQLPSGFPNIDMGPQLKVVERTRTATMLCAASGNPDPEITWFKDFLPVDPSASNGRIKQLRSETFESTPIRGALQIESSEETDQGKYECVATNSAGVRYSSPANLYVRELREVRRVAPRFSILPMSHEIMPGGNVNITCVAVGSPMPYVKWMQGAEDLTPEDDMPVGRNVLELTDVKDSANYTCVAMSSLGVIEAVAQITVKSLPKAPGTPMVTENTATSITITWDSGNPDPVSYYVIEYKSKSQDGPYQIKEDITTTRYSIGGLSPNSEYEIWVSAVNSIGQGPPSESVVTRTGEQAPASAPRNVQARMLSATTMIVQWEEPVEPNGLIRGYRVYYTMEPEHPVGNWQKHNVDDSLLTTVGSLLEDETYTVRVLAFTSVGDGPLSDPIQVKTQQGVPGQPMNLRAEARSETSITLSWSPPRQESIIKYELLFREGDHGREVGRTFDPTTSYVVEDLKPNTEYAFRLAARSPQGLGAFTPVVRQRTLQSKPSAPPQDVKCVSVRSTAILVSWRPPPPETHNGALVGYSVRYRPLGSEDPEPKEVNGIPPTTTQILLEALEKWTQYRITTVAHTEVGPGPESSPVVVRTDEDVPSAPPRKVEAEALNATAIRVLWRSPAPGRQHGQIRGYQVHYVRMEGAEARGPPRIKDVMLADAQWETDDTAEYEMVITNLQPETAYSITVAAYTMKGDGARSKPKVVVTKGAVLGRPTLSVQQTPEGSLLARWEPPAGTAEDQVLGYRLQFGREDSTPLATLEFPPSEDRYTASGVHKGATYVFRLAARSRGGLGEEAAEVLSIPEDTPRGHPQILEAAGNASAGTVLLRWLPPVPAERNGAIVKYTVAVREAGALGPARETELPAAAEPGAENALTLQGLKPDTAYDLQVRAHTRRGPGPFSPPVRYRTFLRDQVSPKNFKVKMIMKTSVLLSWEFPDNYNSPTPYKIQYNGLTLDVDGRTTKKLITHLKPHTFYNFVLTNRGSSLGGLQQTVTAWTAFNLLNGKPSVAPKPDADGFIMVYLPDGQSPVPVQSYFIVMVPLRKSRGGQFLTPLGSPEDMDLEELIQDISRLQRRSLRHSRQLEVPRPYIAARFSVLPPTFHPGDQKQYGGFDNRGLEPGHRYVLFVLAVLQKSEPTFAASPFSDPFQLDNPDPQPIVDGEEGLIWVIGPVLAVVFIICIVIAILLYKNKPDSKRKDSEPRTKCLLNNADLAPHHPKDPVEMRRINFQTPDSGLRSPLREPGFHFESMLSHPPIPIADMAEHTERLKANDSLKLSQEYESIDPGQQFTWEHSNLEVNKPKNRYANVIAYDHSRVILQPIEGIMGSDYINANYVDGYRCQNAYIATQGPLPETFGDFWRMVWEQRSATIVMMTRLEEKSRIKCDQYWPNRGTETYGFIQVTLLDTIELATFCVRTFSLHKNGSSEKREVRQFQFTAWPDHGVPEYPTPFLAFLRRVKTCNPPDAGPIVVHCSAGVGRTGCFIVIDAMLERIKPEKTVDVYGHVTLMRSQRNYMVQTEDQYSFIHEALLEAVGCGNTEVPARSLYAYIQKLAQVEPGEHVTGMELEFKRLANSKAHTSRFISANLPCNKFKNRLVNIMPYESTRVCLQPIRGVEGSDYINASFIDGYRQQKAYIATQGPLAETTEDFWRMLWENNSTIVVMLTKLREMGREKCHQYWPAERSARYQYFVVDPMAEYNMPQYILREFKVTDARDGQSRTVRQFQFTDWPEQGVPKSGEGFIDFIGQVHKTKEQFGQDGPISVHCSAGVGRTGVFITLSIVLERMRYEGVVDIFQTVKMLRTQRPAMVQTEDEYQFCYQAALEYLGSFDHYAT

SEQ ID NO: 2302 - protein, 65 aa, Homo sapiens
MRARALASTSLLLLSRLEPPLADSGERECASHPPRPAAGPSASGNVSGAACTLLRPWTHHMMVLR

SEQ ID NO: 2303 - protein, 1055 aa, Homo sapiens
MRKSIEIIYAITSVILASVSVINESENYEALLECVIILNGILYALPESERKLQSSIQDLCVTWWEKGLPAKEDTGKTAFVMLLRRSLETKTGADVCRLWRIHQALYCFDYDLEESGEIKDMLLECFININYIKKEEGRRFLSCLFNWNINFIKMIHGTIKNQLQGLQKSLMVYIAEIYFRAWKKASGKILEAIENDCIQDFMFHGIHLPRRSPVHSKVREVLSYFHHQKKVRQGVEEMLYRLYKPILWRGLKARNSEVRSNAALLFVEAFPIRDPNLHAIEMDSEIQKQFEELYSLLEDPYPMVRSTGILGVCKITSKYWEMMPPTILIDLLKKVTGELAFDTSSADVRCSVFKCLPMILDNKLSHPLLEQLLPALRYSLHDNSEKVRVAFVDMLLKIKAVRAAKFWKICPMEHILVRLETDSRPVSRRLVSLIFNSFLPVNQPEEVWCERCVTLVQMNHAAARRFYQYAHEHTACTNIAKLIHVIRHCLNACIQRAVREPPEDEEEEDGREKENVTVLDKTLSVNDVACMAGLLEIIVILWKSIDRSMENNKEAKLYTINKFASVLPEYLKVFKDDRCKIPLFMLMSFMPASAVPPFSCGVISTLRSREEGAVDKSYCTLLDCLCSWGQVGHILELVDNWLPTEHAQAKSNTASKGRVQIHDTRPVKPELALVYIEYLLTHPKNRECLLSAPRKKLNHLLKALETSKADLESLLQTPGGKPRGFSEAAAPRAFGLHCRLSIHLQHKFCSEGKVYLSMLEDTGFWLESKILSFIQDQEEDYLKLHRVIYQQIIQTYLTVCKDVVMVGLGDHQFQMQLLQRSLGIMQTVKGFFYVSLLLDILKEITGSSLIQKTDSDEEVAMLLDTVQKVFQKMLECIARSFRKQPEEGLRLLYSVQRPLHEFITAVQSRHTDTPVHRGVLSTLIAGPVVEISHQLRKVSDVEELTPPEHLSDLPPFSRCLIGIIIKSSNVVRSFLDELKACVASNDIEGIVCLTAAVHIILVINAGKHKSSKVREVAATVHRKLKTFMEITLEEDSIERFLYESSSRTLGELLNS

SEQ ID NO: 2304 - protein, 1068 aa, Homo sapiens
MRKSIEIIYAITSVILASVSVINESENYEALLECVIILNGILYALPESERKLQSSIQDLCVTWWEKGLPAKEDTGKTAFVMLLRRSLETKTGADVCRLWRIHQALYCFDYDLEESGEIKDMLLECFININYIKKEEGRRFLSCLFNWNINFIKMIHGTIKNQLQGLQKSLMVYIAEIYFRAWKKASGKILEAIENDCIQDFMFHGIHLPRRSPVHSKVREVLSYFHHQKKVRQGVEEMLYRLYKPILWRGLKARNSEVRSNAALLFVEAFPIRDPNLHAIEMDSEIQKQFEELYSLLEDPYPMVRSTGILGVCKITSKYWEMMPPTILIDLLKKVTGELAFDTSSADVRCSVFKCLPMILDNKLSHPLLEQLLPALRYSLHDNSEKVRVAFVDMLLKIKAVRAAKFWKICPMEHILVRLETDSRPVSRRLVSLIFNSFLPVNQPEEVWCERCVTLVQMNHAAARRFYQYAHEHTACTNIAKLIHVIRHCLNACIQRAVREPPEDEEEEDGREKENVTVLDKTLSVNDVACMAGLLEIIVILWKSIDRSMENNKEAKLYTINKFASVLPEYLKVFKDDRCKIPLFMLMSFMPASAVPPFSCGVISTLRSREEGAVDKSYCTLLDCLCSWGQVGHILELVDNWLPTEHAQAKSNTASKGRVQIHDTRPVKPELALVYIEYLLTHPKNRECLLSAPRKKLNHLLKALETSKADLESLLQTPGGKPRGFSEAAAPRAFGLHCRLSIHLQHKFCSEGKVYLSMLEDTGFWLESKILSFIQDQEEDYLKLHRVIYQQIIQTYLTVCKDVVMVGLGDHQFQMQLLQRSLGIMQTVKGFFYVSLLLDILKEITGSSLIQKTDSDEEVAMLLDTVQKVFQKMLECIARSFRKQPEEGLRLLYSVQRPLHEFITAVQSRHTDTPVHRGVLSTLIAGPVVEISHQLRKVSDVEELTPPEHLSDLPPFSRCLIGIIIKSSNVVRSFLDELKACVASNDIEGIVCLTAAVHIILVINAGKHKSSKVREVAATVHRKLKTFMEITLEEDSIERYEDLLCCPGWALTPGLLDSIYPSASVPIG

SEQ ID NO: 2305 - protein, 25 aa, Homo sapiens
KYSVWISGSILASLSAFQQMWISKQ

SEQ ID NO: 2306 - protein, 720 aa, Homo sapiens
IPRSDSARPRSPRLPGASREPAGRRTPTPSSLCPSTRAPRPFRDPCPAGSAANLPAMETPSQRRATRSGAQASSTPLSPTRITRLQEKEDLQELNDRLAVYIDRVRSLETENAGLRLRITESEEVVSREVSGIKAAYEAELGDARKTLDSVAKERARLQLELSKVREEFKELKARNTKKEGDLIAAQARLKDLEALLNSKEAALSTALSEKRTLEGELHDLRGQVAKLEAALGEAKKQLQDEMLRRVDAENRLQTMKEELDFQKNIYSEELRETKRRHETRLVEIDNGKQREFESRLADALQELRAQHEDQVEQYKKELEKTYSAKLDNARQSAERNSNLVGAAHEELQQSRIRIDSLSAQLSQLQKQLAAKEAKLRDLEDSLARERDTSRRLLAEKEREMAEMRARMQQQLDEYQELLDIKLALDMEIHAYRKLLEGEEERLRLSPSPTSQRSRGRASSHSSQTQGGGSVTKKRKLESTESRSSFSQHARTSGRVAVEEVDEEGKFVRLRNKSNEDQSMGNWQIKRQNGDDPLLTYRFPPKFTLKAGQVVTIWAAGAGATHSPPTDLVWKAQNTWGCGNSLRTALINSTGEEVAMRKLVRSVTVVEDDEDEDGDDLLHHHHGSHCSSSGDPAEYNLRSRTVLCGTCGQPADKASASGSGAQVGGPISSGSSASSVTVTRSYRSVGGSGGGSFGDNLVTRSYLLGNSSPRTQSPQNCSIM

SEQ ID NO: 2307 - protein, 16 aa, Homo sapiens
IFTLRKGIPRLIFFLL

SEQ ID NO: 2308 - protein, 14 aa, Homo sapiens
MEMVYLMLKMSLVF

SEQ ID NO: 2309 - protein, 257 aa, Homo sapiens
KKKMAISGVPVLGFFIIAVLMSAQESWAIKEEHVIIQAEFYLNPDQSGEFMFDFDGDEIFHVDMAKKETVWRLEEFGRFASFEAQGALANIAVDKANLEIMTKRSNYTPITNVPPEVTVLTNSPVELREPNVLICFIDKFTPPVVNVTWLRNGKPVTTGVSETVFLPREDHLFRKFHYLPFLPSTEDVYDCRVEHWGLDEPLLKHWEFDAPSPLPETTENVVCALGLTVGLVGIIIGTIFIIKGLRKSNAAERRGPL

SEQ ID NO: 2310 - protein, 139 aa, Homo sapiens
VRSFSLLLLFSDSMPEPAKSAPAPKKGSKKAVTKAQKKDGKKRKRSRKESYSVYVYKVLKQVHPDTGISSKAMGIMNSFVNDIFERIAGEASRLAHYNKRSTITSREIQTAVRLLLPGELAKHAVSEGTKAVTKYTSSK

SEQ ID NO: 2311 - protein, 19 aa, Homo sapiens
LGPTCCLTIPEPRWEPWLR

SEQ ID NO: 2312 - protein, 99 aa, Homo sapiens
ITDKADIFAFGLTLWEMMTLSIPHINLSNDDDDEDKTFDESDFDDEAYYAALGTRPPINMEELDESYQKVIELFSVCTNEDPKDRPSAAHIVEALETDV

SEQ ID NO: 2313 - protein, 32 aa, Homo sapiens
LLIFVIALLSLGIAYYVSGVLPFVENQPELVH

SEQ ID NO: 2314 - protein, 15 aa, Homo sapiens
VSAGSSLLACSLLLA

SEQ ID NO: 2315 - protein, 53 aa, Homo sapiens
LLIFFSWCVWWLFLSVEGKRRYHPRLSPTPLQNGFSDTPGSEGVGSPGCARSK

SEQ ID NO: 2316 - protein, 93 aa, Homo sapiens
ITTALVCLLLAGMWPEDVDSKSMQVPFSRCCFSFAEQEIPLRAILCYRNTSSICSNEGLIFKLKRGKEACALDTVGWVQRHRKMLRHCPSKRK

SEQ ID NO: 2317 - protein, 96 aa, Homo sapiens
LLRIMQVSTAALAVLLCTMALCNQFSASLAADTPTACCFSYTSRQIPQNFIADYFETSSQCSKPGVIFLTKRSRQVCADPSEEWVQKYVSDLELSA

SEQ ID NO: 2318 - protein, 233 aa, Homo sapiens
LAAAMTPQLLLALVLWASCPPCSGRKGPPAALTLPRVQCRASRYPIAVDCSWTLPPAPNSTSPVSFIATYRLGMAARGHSWPCLQQTPTSTSCTITDVQLFSMAPYVLNVTAVHPWGSSSSFVPFITEHIIKPDPPEGVRLSPLAERQLQVQWEPPGSWPFPEIFSLKYWIRYKRQGAARFHRVGPIEATSFILRAVRPRARYYVQVAAQDLTDYGELSDWSLPATATMSLGK

SEQ ID NO: 2319 - protein, 245 aa, Homo sapiens
RRSRAFLALLGSLLLSGVLAADRERSIHDFCLVSKVVGRCRASMPRWWYNVTDGSCQLFVYGGCDGNSNNYLTKEECLKKCATVTENATGDLATSRNAADSSVPSAPRRQDSEDHSSDMFNYEEYCTANAVTGPCRASFPRWYFDVERNSCNNFIYGGCRGNKNSYRSEEACMLRCFRQQENPPLPLGSKVVVLAGLFVMVLILFLGASMVYLIRVARRNQERALRTVWSSGDDKEQLVKNTYVL

SEQ ID NO: 2320 - protein, 12 aa, Homo sapiens
VLLLVLILLFSL

SEQ ID NO: 2321 - protein, 40 aa, Homo sapiens
IHFLALAALGLGLALGGGSPSRRKAASQPTSLAPEKLREE

SEQ ID NO: 2322 - protein, 13 aa, Homo sapiens
LLMLIVIGVFASN

SEQ ID NO: 2323 - protein, 179 aa, Homo sapiens [sequence omitted]

SEQ ID NO: 2324 - protein, 91 aa, Homo sapiens
MSAGNGTPWDATWNITVQWLAVDIACRTLMFLKLMATYSAAFLPVVIGLDRQAAVLNPLGSRSGVRKLLGAAWGLSFLLAFPQGSRTRNTI

SEQ ID NO: 2325 - protein, 129 aa, Homo sapiens
MDFWLWPLYFLPVSGALRILPEVKVEGELGGSVTIKCPLPEMHVRIYLCREMAGSGTCGTVVSTTNFIKAEYKGRVTLKQYPRKNLFLVEVTQLTESDSGVYACGAGMNTDRGKTQKVTLNVHSGRFLR

SEQ ID NO: 2326 - protein, 158 aa, Homo sapiens [sequence omitted]

SEQ ID NO: 2327 - protein, 121 aa, Homo sapiens [sequence omitted]

SEQ ID NO: 2328 - protein, 167 aa, Homo sapiens [sequence omitted]

SEQ ID NO: 2329 - protein, 1349 aa, Homo sapiens
MTFGNYVLFNLLVAILVEGFQAEGDANRSDTDEDKTSVHFEEDFHKLRELQTTELKMCSLAVTPNGHLEGRGSLSPPLIMCTAATPMPTPKSSPFLDAAPSLPDSRRGSSSSGDPPLGDQKPPASLRSSPCAPWGPSGAWSSRRSSWSSLGRAPSLKRRGQCGERESLLSGEGKGSTDDEAEDGRAAPGPRATPLRRAESLDPRPLRPAALPPTKCRDRDGQVVALPSDFFLRIDSHREDAAELDDDSEDSCCLRLHKVLEPYKPQWCRSREAWALYLFSPQNRFRVSCQKVITHKMFDHVVLVFIFLNCVTIALERPDIDPGSTERVFLSVSNYIFTAIFVAEMMVKVVALGLLSGEHAYLQSSWNLLDGLLVLVSLVDIVVAMASAGGAKILGVLRVLRLLRTLRPLRVISRAPGLKLVVETLISSLRPIGNIVLICCAFFIIFGILGVQLFKGKFYYCEGPDTRNISTKAQCRAAHYRWVRRKYNFDNLGQALMSLFVLSSKDGWVNIMYDGLDAVGVDQQPVQNHNPWMLLYFISFLLIVSFFVLNMFVGVVVENFHKCRQHQEAEEARRREEKRLRRLERRRRKAQRRPYYADYSPTRRSIHSLCTSHYLDLFITFIICVNVITMSMEHYNQPKSLDEALKYCNYVFTIVFVFEAALKLVAFGFRRFFKDRWNQLDLAIVLLSLMGITLEEIEMSAALPINPTIIRIMRVLRIARVLKLLKMATGMRALLDTVVQALPQVGNLGLLFMLLFFIYAALGVELFGRLECSEDNPCEGLSRHATFSNFGMAFLTLFRVSTGDNWNGIMKDTLRECSREDKHCLSYLPALSPVYFVTFVLVAQFVLVNVVVAVLMKHLEESNKEAREDAELDAEIELEMAQGPGSARRVDADRPPLPQESPGARDAPNLVARKVSVSRMLSLPNDSYMFRPVVPASAPHPRPLQEVEMETYGAGTPLGSVASVHSPPAESCASLQIPLAVSSPARSGEPLHALSPRGTARSPSLSRLLCRQEAVHTDSLEGKIDSPRDTLDPAEPGEKTPVRPVTQGGSLQSPPRSPRPASVRTRKHTFGQRCVSSRPAAPGGEEAEASDPADEEVSHITSSACPWQPTAEPHGPEASPVAGGERDLRRLYSVDAQGFLDKPGRADEQWRPSAELGSGEPGEAKAWGPEAEPALGARRKKKMSPPCISVEPPAEDEGSARPSAAEGGSTTLRRRTPSCEATPHRDSLEPTEGSGAGGDPAAKGERWGQASCRAEHLTVPSFAFEPLDLGVPSGDPFLDGSHSVTPESRASSSGAIVPLEPPESEPPMPVGDPPEKRRGLYLTVPQCPLEKPGSPSATPAPGGGADDPV

SEQ ID NO: 2330 - protein, 277 aa, Homo sapiens
MVLGLLVQIWALQEASSLSVQQGPNLLQVRQGSQATLVCQVDQATAWERLRVKWTKDGAILCQPYITNGSLSLGVCGPQGRLSWQAPSHLTLQLDPVSLNHSGAYVCWAAVEIPELEEAEGNITRLFVDPDDPTQNRNRIASFPGFLFVLLGVGSMGVAAIVWGAWFWGRRSCQQRDSGNSPGNAFYSNVLYRPRGAPKKSEDCSGEGKDQRGQSIYSTSFPQPAPRQPHLASRPCPSPRPCPSPRPGHPVSMVRVSPRPSPTQQPRPKGFPKVGEE

SEQ ID NO: 2331 - protein, 273 aa, Homo sapiens
MVLGLLVQIWALQEASSLSVQQGPNLLQVRQGSQATLVCQVDQATAWERLRVKWTKDGAILCQPYITNGSLSLGVCGPQGRLSWQAPSHLTLQLDPVSLNHSGAYVCWAAVEIPELEEAEGNITRLFVDPDDPTQNRNRIASFPGFLFVLLGVGSMGVAAIVWGAWFWGRRSCQQRDSGNAFYSNVLYRPRGAPKKSEDCSGEGKDQRGQSIYSTSFPQPAPRQPHLASRPCPSPRPCPSPRPGHPVSMVRVSPRPSPTQQPRPKGFPKVGEE

SEQ ID NO: 2332 - protein, 99 aa, Homo sapiens [sequence omitted]

SEQ ID NO: 2333 - protein, 290 aa, Homo sapiens [sequence omitted]

SEQ ID NO: 2334 - protein, 520 aa, Homo sapiens
MAGLCLISFLHFFKTLSYVTFPRELASLSPNLVSSFFWNNAPVTPQASPEPGGPDLLRTPLYSHSPLLQPLPPSKAAEELHRVDLVLPEDTTEYFVRTKAGGVCFKPGTKMLERPPPGRPEEKPEGANGSSARRPPRYLLSARERTGGRGARRKWVECVCLPGWHGPSCGVPTVVQYSNLPTKERLVPREVPRRVINAINVNHEFDLLDVRFHELGDVVDAFVVCESNFTAYGEPRPLKFREMLTNGTFEYIRHKVLYVFLDHFPPGGRQDGWIADDYLRTFLTQDGVSRLRNLRPDDVFIIDDADEIPARDGVLFLKLYDGWTEPFAFHMRKSLYGFFWKQPGTLEVVSGCTVDMLQAVYGLDGIRLRRRQYYTMPNFRQYENRTGHILVQWSLGSPLHFAGWHCSWCFTPEGIYFKLVSAQNGDFPRWGDYEDKRDLNYIRGLIRTGGWFDGTQQEYPPADPSEHMYAPKYLLKNYDRFHYLLDNPYQEPRSTAAGGWRHRGPEGRPPARGKLDEAEV

SEQ ID NO: 2335 - protein, 53 aa, Homo sapiens
MAGNSILLAAVSILSACQQSYFALQVGKARLKYKVTPPAVTGSPEFERVFRAQ

SEQ ID NO: 2336 - protein, 132 aa, Homo sapiens
MLLHLSLLALGAAYVYAIPTEIPTSALVKETLALLSTHRTLLIANETLRIPVPVHKNHQLCTEEIFQGIGTLESQTVQGGTVERLFKNLSLIKKYIDGQKKKCGEERRRVNQFLDYLQEFLGVMNTEWIIES

SEQ ID NO: 2337 - protein, 256 aa, Homo sapiens [sequence omitted]

SEQ ID NO: 2338 - protein, 16 aa, Homo sapiens
MKWLLVAAWRTPAALL

SEQ ID NO: 2339 - protein, 755 aa, Homo sapiens
MRKSIEIIYAITSVILASVSVINESENYEALLECVIILNGILYALPESERKLQSSIQDLCVTWWEKGLPAKEDTGKTAFVMLLRRSLETKTGADVCRLWRIHQALYCFDYDLEESGEIKDMLLECFININYIKKEEGRRFLSCLFNWNINFIKMIHGTIKNQLQGLQKSLMVYIAEIYFRAWKKASGKILEAIENDCIQDFMFHGIHLPRRSPVHSKVREVLSYFHHQKKVRQGVEEMLYRLYKPILWRGLKARNSEVRSNAALLFVEAFPIRDPNLHAIEMDSEIQKQFEELYSLLEDPYPMVRSTGILGVCKITSKYWEMMPPTILIDLLKKVTGELAFDTSSADVRCSVFKCLPMILDNKLSHPLLEQLLPALRYSLHDNSEKVRVAFVDMLLKIKAVRAAKFWKICPMEHILVRLETDSRPVSRRLVSLIFNSFLPVNQPEEVWCERCVTLVQMNHAAARRFYQYAHEHTACTNIAKLIHVIRHCLNACIQRAVREPPEDEEEEDGREKENVTVLDKTLSVNDVACMAGLLEIIVILWKSIDRSMENNKEAKLYTINKFASVLPEYLKVFKDDRCKIPLFMLMSFMPASAVPPFSCGVISTLRSREEGAVDKSYCTLLDCLCSWGQVGHILELVDNWLPTEHAQAKSNTASKGRVQIHDTRPVKPELALVYIEYLLTHPKNRECLLSAPRKKLNHLLKALETSKADLESLLQTPGGKPRGFSEAAAPRAFGLHCRLSIHLQHKVCLLLALY

SEQ ID NO: 2340 - protein, 302 aa, Homo sapiens
MWSWKCLLFWAVLVTATLCTARPSPTLPEQDALPSSEDDDDDDDSSSEEKETDNTKPNRMPVAPYWTSPEKMEKKLHAVPAAKTVKFKCPSSGTPNPTLRWLKNGKEFKPDHRIGGYKVRYATWSIIMDSVVPSDKGNYTCIVENEYGSINHTYQLDVVERSPHRPILQAGLPANKTVALGSNVEFMCKVYSDPQPHIQWLKHIEVNGSKIGPDNLPYVQILKVIMAPVFVGQSTGKETTVSGAQVPVGRLSCPRMGSFLTLQAHTLHLSRDLATSPRTSNRGHKVEVSWEQRAAGMGGAGL

SEQ ID NO: 2341 - protein, 152 aa, Homo sapiens [sequence omitted]

SEQ ID NO: 2342 - protein, 637 aa, Homo sapiens
VCWSLKSTRAAENRRDRTWAPRASPASQVGAGRQATSRPAPGMRVLLAALGLLFLGALRAFPQDRPFEDTCHGNPSHYYDKAVRRCCYRCPMGLFPTQQCPQRPTDCRKQCEPDYYLDEADRCTACVTCSRDDLVEKTPCAWNSSRVCECRPGMFCSTSAVNSCARCFFHSVCPAGMIVKFPGTAQKNTVCEPASPGVSPACASPENCKEPSSGTIPQAKPTPVSPATSSASTMPVRGGTRLAQEAASKLTRAPDSPSSVGRPSSDPGLSPTQPCPEGSGDCRKQCEPDYYLDEAGRCTACVSCSRDDLVEKTPCAWNSSRTCECRPGMICATSATNSCARCVPYPICAAETVTKPQDMAEKDTTFEAPPLGTQPDCNPTPENGEAPASTSPTQSLLVDSQASKTLPIPTSAPVALSSTGKPVLDAGPVLFWVILVLVVVVGSSAFLLCHRRACRKRIRQKLHLCYPVQTSQPKLELVDSRPRRSSTQLRSGASVTEPVAEERGLMSQPLMETCHSVGAAYLESLPLQDASPAGGPSSPRDLPEPRVSTEHTNNKIEKIYIMKADTVIVGTVKAELPEGRGLAGPAEPELEEELEADHTPHYPEQETEPPLGSCSDVMLSVEEEGKEDPLPTAASGK

SEQ ID NO: 2343 - protein, 155 aa, Homo sapiens
VLTRVLPALLLAPWPAGLFLAMGRSRRTGAHRAHSLARQMKAKRRRPDLDEIHRELRPQGSARPQPDPNAEFDPDLPGGGLHRCLACARYFIDSTNLKTHFRSKDHKKRLKQLSVEPYSQEEAERAAGMGSYVPPRRLAVPTEVSTEVPEMDTST

SEQ ID NO: 2344 - protein, 22 aa, Homo sapiens
VWISGSILASLSAFQQMWISKQ

SEQ ID NO: 2345 - protein, 71 aa, Homo sapiens
LAVAACVLLLTSAQLGLHIWQLRSQCMWPRETQLLLEVPPSTEDARSCQFPEEERGERSAEEKGRLGDLWV

SEQ ID NO: 2346 - protein, 262 aa, Homo sapiens
LLLLGLGLSTVTGLHCVGDTYPSNDRCCHECRPGNGMVSRCSRSQNTVCRPCGPGFYNDVVSSKPCKPCTWCNLRSGSERKQLCTATQDTVCRCRAGTQPLDSYKPGVDCAPCPPGHFSPGDNQACKPWTNCTLAGKHTLQPASNSSDAICEDRDPPATQPQETQGPPARPITVQPTEAWPRTSQGPSTRPVEVPGGRAVAAILGLGLVLGLLGPLAILLALYLLRRDQRLPPDAHKPPGGGSFRTPIQEEQADAHSTLAKI

SEQ ID NO: 2347 - protein, 110 aa, Homo sapiens
ILALLGICSLTAYIVEGVGSEVSHRRTCVSLTTQRLPVSRIKTYTITEGSLRAVIFITKRGLKVCADPQATWVRDVVRSMDRKSNTRNNMIQTKPTGTQQSTNTAVTLTG

SEQ ID NO: 2348 - protein, 248 aa, Homo sapiens
LGRSMRWCLLLIWAQGLRQAPLASGMMTGTIETTGNISAEKGGSIILQCHLSSTTAQVTQVNWEQQDQLLAICNADLGWHISPSFKDRVAPGPGLGLTLQSLTVNDTGEYFCIYHTYPDGTYTGRIFLEVLESSVAEHGARFQIPLLGAMAATLVVICTAVIVVVALTRKKKALRIHSVEGDLRRKSAGQEEWSPSAPSPPGSCVQAEAAPAGLCGEQRGEDCAELHDYFNVLSYRSLGNCSFFTETG

SEQ ID NO: 2349 - protein, 236 aa, Homo sapiens
LVQSCKQVYRSIAMKFVPCLLLVTLSCLGTLGQAPRQKQGSTGEEFHFQTGGRDSCTMRPSSLGQGAGEVWLRVDCRNTDQTYWCEYRGQPSMCQAFAADPKPYWNQALQELRRLHHACQGAPVLRPSVCREAGPQAHMQQVTSSLKGSPEPNQQPEAGTPSLRPKATVKLTEATQLGKDSMEELGKAKPTTRPTAKPTQPGPRPGGNEEAKKKAWEHCWKPFQALCAFLISFFRG

SEQ ID NO: 2350 - protein, 36 aa, Homo sapiens
LLALVAILWKLGFFKRKYEKMTKNPDEIDETTELSS

SEQ ID NO: 2351 - protein, 37 aa, Homo sapiens
IKGVLCVPGMVLLWCPWCDPSPAGNSLREVGPLHQCC

SEQ ID NO: 2352 - protein, 236 aa, Homo sapiens
LWPGAALLVLLGVAASLCVRCSRPGAKRSEKIYQQRSLREDQQSFTGSRTYSLVGQAWPGPLADMAPTRKDKLLQFYPSLEDPASSRYQNFSKGSRHGSEEAYIDPIAMEYYNWGRFSKPPEDDDANSYENVLICKQKTTETGAQQEGIGGLCRGDLSLSLALKTGPTSGLCPSASPEEDEESEDYQNSASIHQWRESRKVMGQLQREASPGPVGSPDEEDGEPDYVNGEVAATEA

SEQ ID NO: 2353 - protein, 463 aa, Homo sapiens [sequence omitted]

SEQ ID NO: 2354 - protein, 16 aa, Homo sapiens
LVSAGSSLLACSLLLA

SEQ ID NO: 2355 - protein, 577 aa, Homo sapiens
LPCLVVLLAALLSLRLGSDAHGTELPSPPSVWFEAEFFHHILHWTPIPNQSESTCYEVALLRYGIESWNSISNCSQTLSYDLTAVTLDLYHSNGYRARVRAVDGSRHSNWTVTNTRFSVDEVTLTVGSVNLEIHNGFILGKIQLPRPKMAPANDTYESIFSHFREYEIAIRKVPGNFTFTHKKVKHENFSLLTSGEVGEFCVQVKPSVASRSNKGMWSKEECISLTRQYFTVTNVIIFFAFVLLLSGALAYCLALQLYVRRRKKLPSVLLFKKPSPFIFISQRPSPETQDTIHPLDEEAFLKVSPELKNLDLHGSTDSGFGSTKPSLQTEEPQFLLPDPHPQADRTLGNREPPVLGDSCSSGSSNSTDSGICLQEPSLSPSTGPTWEQQVGSNSRGQDDSGIDLVQNSEGRAGDTQGGSALGHHSPPEPEVPGEEDPAAVAFQGYLRQTRCAEEKATKTGCLEEESPLTDGLGPKFGRCLVDEAGLHPPALAKGYLKQDPLEMTLASSGAPTGQWNQPTEEWSLLALSSCSDLGISDWSFAHDLAPLGCVAAPGGLLGSFNSDLVTLPLISSLQSSE

SEQ ID NO: 2356 - protein, 2207 aa, Homo sapiens
RESRLPFLFTLVALLPPGALCEVWTQRLHGGSAPLPQDRGFLVVQGDPRELRLWARGDARGASRADEKPLRRKRSAALQPEPIKVYGQVSLNDSHNQMVVHWAGEKSNVIVALARDSLALARPKSSDVYVSYDYGKSFKKISDKLNFGLGNRSEAVIAQFYHSPADNKRYIFADAYAQYLWITFDFCNTLQGFSIPFRAADLLLHSKASNLLLGFDRSHPNKQLWKSDDFGQTWIMIQEHVKSFSWGIDPYDKPNTIYIERHEPSGYSTVFRSTDFFQSRENQEVILEEVRDFQLRDKYMFATKVVHLLGSEQQSSVQLWVSFGRKPMRAAQFVTRHPINEYYIADASEDQVFVCVSHSNNRTNLYISEAEGLKFSLSLENVLYYSPGGAGSDTLVRYFANEPFADFHRVEGLQGVYIATLINGSMNEENMRSVITFDKGGTWEFLQAPAFTGYGEKINCELSQGCSLHLAQRLSQLLNLQLRRMPILSKESAPGLIIATGSVGKNLASKTNVYISSSAGARWREALPGPHYYTWGDHGGIITAIAQGMETNELKYSTNEGETWKTFIFSEKPVFVYGLLTEPGEKSTVFTIFGSNKENVHSWLILQVNATDALGVPCTENDYKLWSPSDERGNECLLGHKTVFKRRTPHATCFNGEDFDRPVVVSNCSCTREDYECDFGFKMSEDLSLEVCVPDPEFSGKSYSPPVPCPVGSTYRRTRGYRKISGDTCSGGDVEARLEGELVPCPLAEENEFILYAVRKSIYRYDLASGATEQLPLTGLRAAVALDFDYEHNCLYWSDLALDVIQRLCLNGSTGQEVIINSGLETVEALAFEPLSQLLYWVDAGFKKIEVANPDGDFRLTIVNSSVLDRPRALVLVPQEGVMFWTDWGDLKPGIYRSNMDGSAAYHLVSEDVKWPNGISVDDQWIYWTDAYLECIERITFSGQQRSVILDNLPHPYAIAVFKNEIYWDDWSQLSIFRASKYSGSQMEILANQLTGLMDMKIFYKGKNTGSNACVPRPCSLLCLPKANNSRSCRCPEDVSSSVLPSGDLMCDCPQGYQLKNNTCVKQENTCLRNQYRCSNGNCINSIWWCDFDNDCGDMSDERNCPTTICDLDTQFRCQESGTCIPLSYKCDLEDDCGDNSDESHCEMHQCRSDEYNCSSGMCIRSSWVCDGDNDCRDWSDEANCTAIYHTCEASNFQCRNGHCIPQRWACDGDTDCQDGSDEDPVNCEKKCNGFRCPNGTCIPSSKHCDGLRDCSDGSDEQHCEPLCTHFMDFVCKNRQQCLFHSMVCDGIIQCRDGSDEDAAFAGCSQDPEFHKVCDEFGFQCQNGVCISLIWKCDGMDDCGDYSDEANCENPTEAPNCSRYFQFRCENGHCIPNRWKCDRENDCGDWSDEKDCGDSHILPFSTPGPSTCLPNYYRCSSGTCVMDTWVCDGYRDCADGSDEEACPLLANVTAASTPTQLGRCDRFEFECHQPKTCIPNWKRCDGHQDCQDGRDEANCPTHSTLTCMSREFQCEDGEACIVLSERCDGFLDCSDESDEKACSDELTVYKVQNLQWTADFSGDVTLTWMRPKKMPSASCVYNVYYRVVGESIWKTLETHSNKTNTVLKVLKPDTTYQVKVQVQCLSKAHNTNDFVTLRTPEGLPDAPRNLQLSLPREAEGVIVGHWAPPIHTHGLIREYIVEYSRSGSKMWASQRAASNFTEIKNLLVNTLYTVRVAAVTSRGIGNWSDSKSITTIKGKVIPPPDIHIDSYGENYLSFTLTMESDIKVNGYVVNLFWAFDTHKQERRTLNFRGSILSHKVGNLTAHTSYEISAWAKTDLGDSPLAFEHVMTRGVRPPAPSLKAKAINQTAVECTWTGPRNVVYGIFYATSFLDLYRNPKSLTTSLHNKTVIVSKDEQYLFLVRVVVPYQGPSSDYVVVKMIPDSRLPPRHLHVVHTGKTSVVIKWESPYDSPDQDLLYAVAVKDLIRKTDRSYKVKSRNSTVEYTLNKLEPGGKYHIIVQLGNMSKDSSIKITTVSLSAPDALKIITENDHVLLFWKSLALKEKHFNESRGYEIHMFDSAMNITAYLGNTTDNFFKISNLKMGHNYTFTVQARCLFGNQICGEPAILLYDELGSGADASATQAARSTDVAAVVVPILFLILLSLGVGFAILYTKHRRLQSSFTAFANSHYSSRLGSAIFSSGDDLGEDDEDAPMITGFSDDVPMVIA

SEQ ID NO: 2357 - protein, 7 aa, Homo sapiens
LFLVFII

SEQ ID NO: 2358 - protein, 21 aa, Homo sapiens
VRSPLPPVVSSLAFWLCHALL

SEQ ID NO: 2359 - protein, 1159 aa, Homo sapiens
RFWLLPAMALRVLLLTALTLCHGFNLDTENAMTFQENARGFGQSVVQLQGSRVVVGAPQEIVAANQRGSLYQCDYSTGSCEPIRLQVPVEAVNMSLGLSLAATTSPPQLLACGPTVHQTCSENTYVKGLCFLFGSNLRQQPQKFPEALRGCPQEDSDIAFLIDGSGSIIPHDFRRMKEFVSTVMEQLKKSKTLFSLMQYSEEFRIHFTFKEFQNNPNPRSLVKPITQLLGRTHTATGIRKVVRELFNITNGARKNAFKILVVITDGEKFGDPLGYEDVIPEADREGVIRYVIGVGDAFRSEKSRQELNTIASKPPRDHVFQVNNFEALKTIQNQLREKIFAIEGTQTGSSSSFEHEMSQEGFSAAITSNGPLLSTVGSYDWAGGVFLYTSKEKSTFINMTRVDSDMNDAYLGYAAAIILRNRVQSLVLGAPRYQHIGLVAMFRQNTGMWESNANVKGTQIGAYFGASLCSVDVDSNGSTDLVLIGAPHYYEQTRGGQVSVCPLPRGRARWQCDAVLYGEQGQPWGRFGAALTVLGDVNGDKLTDVAIGAPGEEDNRGAVYLFHGTSGSGISPSHSQRIAGSKLSPRLQYFGQSLSGGQDLTMDGLVDLTVGAQGHVLLLRSQPVLRVKAIMEFNPREVARNVFECNDQVVKGKEAGEVRVCLHVQKSTRDRLREGQIQSVVTYDLALDSGRPHSRAVFNETKNSTRRQTQVLGLTQTCETLKLQLPNCIEDPVSPIVLRLNFSLVGTPLSAFGNLRPVLAEDAQRLFTALFPFEKNCGNDNICQDDLSITFSFMSLDCLVVGGPREFNVTVTVRNDGEDSYRTQVTFFFPLDLSYRKVSTLQNQRSQRSWRLACESASSTEVSGALKSTSCSINHPIFPENSEVTFNITFDVDSKASLGNKLLLKANVTSENNMPRTNKTEFQLELPVKYAVYMVVTSHGVSTKYLNFTASENTSRVMQHQYQVSNLGQRSLPISLVFLVPVRLNQTVIWDRPQVTFSENLSSTCHTKERLPSHSDFLAELRKAPVVNCSIAVCQRIQCDIPFFGIQEEFNATLKGNLSFDWYIKTSHNHLLIVSTAEILFNDSVFTLLPGQGAFVRSQTETKVEPFEVPNPLPLIVGSSVGGLLLLALITAALYKLGFFKRQYKDMMSEGGPPGAEPQ

SEQ ID NO: 2360 - protein, 61 aa, Homo sapiens
MSLWSCLLFLCTPSPTTTSPSPDPSQPLRRQMSLWTPTSLNLIPTMPQMMTLCLRTLPGFG

SEQ ID NO: 2361 - protein, 44 aa, Homo sapiens
LILFLGASMVYLIRVARRNQERALRTVWSSGDDKEQLVKNTYVL

SEQ ID NO: 2362 - protein, 264 aa, Homo sapiens
RMLLAWVQAFLVSNMLLAEAYGSGGCFWDNGHLYREDQTSPAPGLRCLNWLDAQSGLASAPVSGAGNHSYCRNPDEDPRGPWCYVSGEAGVPEKRPCEDLRCPETTSQALPAFTTEIQEASEGPGADEVQVFAPANALPARSEAAAVQPVIGISQRVRMNSKEKKDLGTLGYVLGITMMVIIIAIGAGIILGYSYKRGKDLKEQHDQKVCEREMQRITLPLSAFTNPTCEIVDEKTVVVHTSQTPVDPQEGTTPLMGQAGTPGA

SEQ ID NO: 2363 - protein, 317 aa, Homo sapiens
MSGSLLGIVGCMGIGATVVLKSKFSAGQFWEDCQQHRVTVFQYIGELCRYLVNQPPSKAERGHKVRLAVGSGLRPDTWERFVRRFGPLQVLETYGLTEGNVATINYTGQRGAVGRASWLYKHIFPFSLIRYDVTTGEPIRDPQGHCMATSPGEPGLLVAPVSQQSPFLGYAGGPELAQGKLLKDVFRPGDVFFNTGDLLVCDDQGFLRFHDRTGDTFRWKGENVATTEVAEVFEALDFLQEVNVYGVTVPGHEGRAGMAALVLRPPHALDLMQLYTHVSENLPPYARPRFLRLQAVGAYLPLTTARYSALLAGNLRI

SEQ ID NO: 2364 - protein, 25 aa, Homo sapiens
MFPGIMLRTAFRVAALFSSLHLGNT

SEQ ID NO: 2365 - protein, 154 aa, Homo sapiens [sequence omitted]

SEQ ID NO: 2366 - protein, 119 aa, Homo sapiens
MNVVFITILIIALIALSVGQYNCPGQYTFSMPSDSHVSSCSEDWVGYQRKCYFISTVKRSWTSAQNACSEHGATLAVIDSEKDMNFLKRYAGREEHWVGLKKEPGHPWKWSNGKEFNNW

SEQ ID NO: 2367 - protein, 90 aa, Homo sapiens
MNVVFITILIIALIALSVGQYNCPGQYTFSMPSDSHVSSCSEDWVGYQRKCYFISTVKRSWTSAQNACSEHGATLAVIDSEKDMVRIKKR

SEQ ID NO: 2368 - protein, 162 aa, Homo sapiens [sequence omitted]

SEQ ID NO: 2369 - protein, 476 aa, Homo sapiens
MGCWGQLLVWFGAAGAILCSSPGSQETFLRSSPLPLASPSPRDPKVSAPPSILEPASPLNSPGTEGSWLFSTCGASGRHGPTQTQCDGAYAGTSVVVTVGAAGQLRGVQLWRVPGPGQYLISAYGAAGGKGAKNHLSRAHGVFVSAIFSLGLGESLYILVGQQGEDACPGGSPESQLVCLGESRAVEEHAAMDGSEGVPGSRRWAGGGGGGGGATYVFRVRAGELEPLLVAAGGGGRAYLRPRDRGRTQASPEKLENRSEAPGSGGRGGAAGGGGGWTSRAPSPQAGRSLQEGAEGGQGCSEAWATLGWAAAGGFGGGGGACTAGGGGGGYRGGDASETDNLWADGEDGVSFIHPSSELFLQPLAVTENHGEVEIRRHLNCSHCPLRDCQWQAELQLAECLCPEGMELAVDNVTCMDLHKPPGPLVLMVAVVATSTLSLLMVCGVLILGTKRLAGTVDSRLLLSSELGWVSAGSRG

SEQ ID NO: 2370 - protein, 259 aa, Homo sapiens
MRLRLRLLALLLLLLAPPARAPKPSAQDVSLGVDWLTRYGYLPPPHPAQAQLQSPEKLRDAIKVMQRFAGLPETGRMDPGTVATMRKPRCSLPDVLGVAGLVRRRRRYALSGSVWKKRTLTWRVRSFPQSSQLSQETVRVLMSYALMAWGMESGLTFHEVDSPQGQEPDILIDFARAFHQDSYPFDGLGGTLAHAFFPGEHPISGDTHFDDEETWTFGSKASQQLEQELAGGSPVDEELGFSRGWRVNPLGPGSPERLS

SEQ ID NO: 2371 - protein, 1209 aa, Homo sapiens
MFTGHLLFLALLMFAFSTFEESVSNYSEWAVFTDDIDQFKTQKVQDFRPNQKLKKSMLHPSLYFDAGEIQAMRQKSRASHLHLFRAIRSAVTVMLSNPTYYLPPPKHADFAAKWNEIYGNNLPPLALYCLLCPEDKVAFEFVLEYMDRMVGYKDWLVENAPGDEVPIGHSLTGFATAFDFLYNLLDNHRRQKYLEKIWVITEEMYEYSKVRSWGKQLLHNHQATNMIALLTGALVTGVDKGSKANIWKQAVVDVMEKTMFLLNHIVDGSLDEGVAYGSYTAKSVTQYVFLAQRHFNINNLDNNWLKMHFWFYYATLLPGFQRTVGIADSNYNWFYGPESQLVFLDKFILKNGAGNWLAQQIRKHRPKDGPMVPSTAQRWSTLHTEYIWYDPQLTPQPPADYGTAKIHTFPNWGVVTYGAGLPNTQTNTFVSFKSGKLGGRAVYDIVHFQPYSWIDGWRSFNPGHEHPDQNSFTFAPNGQVFVSEALYGPKLSHLNNVLVFAPSPSSQCNKPWEGQLGECAQWLKWTGEEVGDAAGEIITASQHGEMVFVSGEAVSAYSSAMRLKSVYRALLLLNSQTLLVVDHIERQEDSPINSVSAFFHNLDIDFKYIPYKFMNRYNGAMMDVWDAHYKMFWFDHHGNSPMASIQEAEQAAEFKKRWTQFVNVTFQMEPTITRIAYVFYGPYINVSSCRFIDSSNPGLQISLNVNNTEHVVSIVTDYHNLKTRFNYLGFGGFASVADQGQITRFGLGTQAIVKPVRHDRIIFPFGFKFNIAVGLILCISLVILTFQWRFYLSFRKLMRWILILVIALWFIELLDVWSTCSQPICAKWTRTEAEGSKKSLSSEGHHMDLPDVVITSLPGSGAEILKQLFFNSSDFLYIRVPTAYIDIPETELEIDSFVDACEWKVSDIRSGHFRLLRGWLQSLVQDTKLHLQNIHLHEPNRGKLAQYFAMNKDKKRKFKRRESLPEQRSQMKGAFDRDAEYIRALRRHLVYYPSARPVLSLSSGSWTLKLHFFQEVLGASMRALYIVRDPRAWIYSMLYNSKPSLYSLKNVPEHLAKLFKIEGGKGKCNLNSGYAFEYEPLRKELSKSKSNAVSLLSHLWLANTAAALRINTDLLPTSYQLVKFEDIVHFPQKTTERIFAFLGIPLSPASLNQILFATSTNLFYLPYEGEISPTNTNVWKQNLPRDEIKLIENICWTLMDRLGYPKFMD

SEQ ID NO: 2372 - protein, 135 aa, Homo sapiens
MCYVDEERDPHRHLPAGAFLQTPQLGVRVAPGLALQDVSRFIFPFQVLGACGSVNFGTICGTTMCDQTPNTPEAQWCRGASNLSRAGVEGLKVRVTDSHRTRSWTLLFLCKNSPSTSRVALQKKLRPSSLSVAFS

SEQ ID NO: 2373 - protein, 89 aa, Homo sapiens [sequence omitted]

SEQ ID NO: 2374 - protein, 173 aa, Homo sapiens
MCKASFTGDNAARAVFPSIVGHPRHQGVMVGMGQKDSYVGDEAQSKRGILTLKYPIEHGIVTNWDDMEKIWHHTFYNELRVAPEEQPMLLFEAPLNPRANCKKMTQIIFETFNTPAMYLAIQTMLSLYASGRTTGIVLDSSDGVTHTVPIYEGYALPNAILLLDLAGRDLTTS

SEQ ID NO: 2375 - protein, 19 aa, Homo sapiens
MLALLGLSQALNILLGLKV

SEQ ID NO: 2376 - protein, 472 aa, Homo sapiens [sequence omitted]

SEQ ID NO: 2377 - protein, 1178 aa, Homo sapiens
MPKKKRLSAGRVPLILFLCQMISALEVPLDLVQPPTITQQSPKDYIIDPRENIVIQCEAKGKPPPSFSWTRNGTHFDIDKDPLVTMKPGTGTLIINIMSEGKAETYEGVYQCTARNERGAAVSNNIVVRPSRSPLWTKEKLEPITLQSGQSLVLPCRPPIGLPPPIIFWMDNSFQRLPQSERVSQGLNGDLYFSNVLPEDTREDYICYARFNHTQTIQQKQPISVKVISVDELNDTIAANLSDTEFYGAKSSRERPPTFLTPEGNASNKEELRGNVLSLECIAEGLPTPIIYWAKEDGMLPKNRTVYKNFEKTLQIIHVSEADSGNYQCIAKNALGAIHHTISVRVKAAPYWITAPQNLVLSPGEDGTLICRANGNPKPRISWLTNGVPIEIAPDDPSRKIDGDTIIFSNVQERSSAVYQCNASNEYGYLLANAFVNVLAEPPRILTPANTLYQVIANRPALLDCAFFGSPLPTIEWFKGAKGSALHEDIYVLHENGTLEIPVAQKDSTGTYTCVARNKLGMAKNEVHLEIKDPTWIVKQPEYAVVQRGSMVSFECKVKHDHTLSLTVLWLKDNRELPSDERFTVDKDHLVVADVSDDDSGTYTCVANTTLDSVSASAVLSVVDVPNPPFDLELTDQLDKSVQLSWTPGDDNNSPITKFIIEYEDAMHKPGLWHHQTEVSGTQTTAQLKLSPYVNYSFRVMAVNSIGKSLPSEASEQYLTKASEPDKNPTAVEGLGSEPDNLVITWKPLNGFESNGPGLQYKVSWRQKDGDDEWTSVVVANVSKYIVSGTPTFVPYLIKVQALNDMGFAPEPAVVMGHSGEDLPMVAPGNVRVNVVNSTLAEVHWDPVPLKSIRGHLQGYRIYYWKTQSSSKRNRRHIEKKILTFQGSKTHGMLPGLEPFSHYTLNVRVVNGKGEGPASPDRVFNTPEGVPSAPSSLKIVNPTLDSLTLEWDPPSHPNGILTEYTLKYQPINSTHELGPLVDLKIPANKTRWTLKNLNFSTRYKFYFYAQTSAGSGSQITEEAVTTVDEAMASRQVDIATQGWFIGLMCAVALLILILLIVCFIRRNKGGKYPVKEKEDAHADPEIQPMKEDDGTFGEYSDAEDHKPLKKGSRTPSDRTVKKEDSDDSLVDYGEGVNGQFNEDGSFIGQYSGKKEKEPAEGNESSEAPSPVNAMNSFV

SEQ ID NO: 2378 - protein, 38 aa, Homo sapiens
ISRLGLLGTATLTVWFQTPVPGWIPAIHAPSLISRSSQ

SEQ ID NO: 2379 - protein, 707 aa, Homo sapiens
LPGASREPAGRRTPTPSSLCPSTRAPRPFRDPCPAGSAANLPAMETPSQRRATRSGAQASSTPLSPTRITRLQEKEDLQELNDRLAVYIDRVRSLETENAGLRLRITESEEVVSREVSGIKAAYEAELGDARKTLDSVAKERARLQLELSKVREEFKELKARNTKKEGDLIAAQARLKDLEALLNSKEAALSTALSEKRTLEGELHDLRGQVAKLEAALGEAKKQLQDEMLRRVDAENRLQTMKEELDFQKNIYSEELRETKRRHETRLVEIDNGKQREFESRLADALQELRAQHEDQVEQYKKELEKTYSAKLDNARQSAERNSNLVGAAHEELQQSRIRIDSLSAQLSQLQKQLAAKEAKLRDLEDSLARERDTSRRLLAEKEREMAEMRARMQQQLDEYQELLDIKLALDMEIHAYRKLLEGEEERLRLSPSPTSQRSRGRASSHSSQTQGGGSVTKKRKLESTESRSSFSQHARTSGRVAVEEVDEEGKFVRLRNKSNEDQSMGNWQIKRQNGDDPLLTYRFPPKFTLKAGQVVTIWAAGAGATHSPPTDLVWKAQNTWGCGNSLRTALINSTGEEVAMRKLVRSVTVVEDDEDEDGDDLLHHHHGSHCSSSGDPAEYNLRSRTVLCGTCGQPADKASASGSGAQVGGPISSGSSASSVTVTRSYRSVGGSGGGSFGDNLVTRSYLLGNSSPRTQSPQNCSIM

SEQ ID NO: 2380 - protein, 229 aa, Homo sapiens
LCGLALLCALSLGQRPTGGPGCGPGRLLLGTGTDARCCRVHTTRCCRDYPGEECCSEWDCMCVQPEFHCGDPCCTTCRHHPCPPGQGVQSQGKFSFGFQCIDCASGTFSGGHEGHCKPWTDCTQFGFLTVFPGNKTHNAVCVPGSPPAEPLGWLTVVLLAVAACVLLLTSAQLGLHIWQLRSQCMWPRETQLLLEVPPSTEDARSCQFPEEERGERSAEEKGRLGDLWV

SEQ ID NO: 2381 - protein, 263 aa, Homo sapiens
IIPVPDFIMGNSCYNIVATLLLVLNFERTRSLQDPCSNCPAGTFCDNNRNQICSPCPPNSFSSAGGQRTCDICRQCKGVFRTRKECSSTSNAECDCTPGFHCLGAGCSMCEQDCKQGQELTKKGCKDCCFGTFNDQKRGICRPWTNCSLDGKSVLVNGTKERDVVCGPSPADLSPGASSVTPPAPAREPGHSPQIISFFLALTSTALLFLLFFLTLRFSVVKRGRKKLLYIFKQPFMRPVQTTQEEDGCSCRFPEEEEGGCEL

SEQ ID NO: 2382 - protein, 82 aa, Homo sapiens
VLKQVHPDTGISSKTMGIMNSFVNDIFERIAGEASRLAHYNKRSTITSREIQTAVRLLLPGELAKHAVSEGTKAVTKYTSSK

SEQ ID NO: 2383 - protein, 26 aa, Homo sapiens
IAGLTIFGMIFSMVLCCAIRNSRDVI

SEQ ID NO: 2384 - protein, 13 aa, Homo sapiens
ILMFRGLVLVHLS

SEQ ID NO: 2385 - protein, 15 aa, Homo sapiens
LCFFLFQFILNAYFS

SEQ ID NO: 2386 - protein, 159 aa, Homo sapiens
VPPADPNMSRLPVLLLLQLLVRPGLQAPMTQTTPLKTSWVNCSNMIDEIITHLKQPPLPLLDFNNLNGEDQDILMENNLRRPNLEAFNRAVKSLQNASAIESILKNLLPCLPLATAAPTRHPIHIKDGDWNEFRRKLTFYLKTLENAQAQQTTLSLAIF

SEQ ID NO: 2387 - protein, 66 aa, Homo sapiens
LGLSGYRKASLRCSLLRIILFFSRCLRKCTMERRRWRLLPFRQKLPNSCPSSSIPSIPTRRFSFGS

SEQ ID NO: 2388 - protein, 12 aa, Homo sapiens
IWCTLIPVTFGL

SEQ ID NO: 2389 - protein, 282 aa, Homo sapiens
LPRLVPRVRKMDSYLLMWGLLTFIMVPGCQAELCDDDPPEIPHATFKAMAYKEGTMLNCECKRGFRRIKSGSLYMLCTGNSSHSSWDNQCQCTSSATRNTTKQVTPQPEEQKERKTTEMQSPMQPVDQASLPGHCREPPPWENEATERIYHFVVGQMVYYQCVQGYRALHRGPAESVCKMTHGKTRWTQPQLICTGEMETSQFPGEEKPQASPEGRPESETSCLVTTTDFQIQTEMAATMETSIFTTEYQVAVAGCVFLLISVLLLSGLTWQRRQRKSRRTI

SEQ ID NO: 2390 - protein, 579 aa, Homo sapiens
RMLPCLVVLLAALLSLRLGSDAHGTELPSPPSVWFEAEFFHHILHWTPIPNQSESTCYEVALLRYGIESWNSISNCSQTLSYDLTAVTLDLYHSNGYRARVRAVDGSRHSNWTVTNTRFSVDEVTLTVGSVNLEIHNGFILGKIQLPRPKMAPANDTYESIFSHFREYEIAIRKVPGNFTFTHKKVKHENFSLLTSGEVGEFCVQVKPSVASRSNKGMWSKEECISLTRQYFTVTNVIIFFAFVLLLSGALAYCLALQLYVRRRKKLPSVLLFKKPSPFIFISQRPSPETQDTIHPLDEEAFLKVSPELKNLDLHGSTDSGFGSTKPSLQTEEPQFLLPDPHPQADRTLGNREPPVLGDSCSSGSSNSTDSGICLQEPSLSPSTGPTWEQQVGSNSRGQDDSGIDLVQNSEGRAGDTQGGSALGHHSPPEPEVPGEEDPAAVAFQGYLRQTRCAEEKATKTGCLEEESPLTDGLGPKFGRCLVDEAGLHPPALAKGYLKQDPLEMTLASSGAPTGQWNQPTEEWSLLALSSCSDLGISDWSFAHDLAPLGCVAAPGGLLGSFNSDLVTLPLISSLQSSE

SEQ ID NO: 2391 - protein, 176 aa, Homo sapiens
LAVLILAIILLQGTLAQSIKGNHLVKVYDYQEDGSVLLTCDAEAKNITWFKDGKMIGFLTEDKKKWNLGSNAKDPRGMYQCKGSQNKSKPLQVYYRMCQNCIELNAATISGFLFAEIVSIFVLAVGVYFIAGQDGVRQSRASDKQTLLPNDQLYQPLKDREDDQYSHLQGNQLRRN

SEQ ID NO: 2392 - protein, 18 aa, Homo sapiens
LATLLLRLLLSLGTGCQR

SEQ ID NO: 2393 - protein, 86 aa, Homo sapiens
TATLLCLLSATALLCSLGHPRPHLLRLPDLPSFPAFLWIPASGHPSPPSLQGPLLVSLLLEPLPPPPSLQNFSFTPHPPPLPPFLF

SEQ ID NO: 2394 - protein, 528 aa, Homo sapiens
IGEMWEAQFLGLLFLQPLWVAPVKPLQPGAEVPVVWAQEGAPAQLPCSPTIPLQDLSLLRRAGVTWQHQPDSGPPAAAPGHPLAPGPHPAAPSSWGPRPRRYTVLSVGPGGLRSGRLPLQPRVQLDERGRQRGDFSLWLRPARRADAGEYRAAVHLRDRALSCRLRLRLGQASMTASPPGSLRASDWVILNCSFSRPDRPASVHWFRNRGQGRVPVRESPHHHLAESFLFLPQVSPMDSGPWGCILTYRDGFNVSIMYNLTVLGLEPPTPLTVYAGAGSRVGLPCRLPAGVGTRSFLTAKWTPPGGGPDLLVTGDNGDFTLRLEDVSQAQAGTYTCHIHLQEQQLNATVTLAIITVTPKSFGSPGSLGKLLCEVTPVSGQERFVWSSLDTPSQRSFSGPWLEAQEAQLLSQPWQCQLYQGERLLGAAVYFTELSSPGAQRSGRAPGALPAGHLLLFLILGVLSLLLLVTGAFGFHLWRRQWRPRRFSALEQGIHPPQAQSKIEELEQEPEPEPEPEPEPEPEPEPEQL

SEQ ID NO: 2395 - protein, 190 aa, Homo sapiens
KMLGSRAVMLLLLLPWTAQGRAVPGGSSPAWTQCQQLSQKLCTLAWSAHPLVGHMDLREEGDEETTNDVPHIQCGDGCDPQGLRDNSQFCLQRIHQGLIFYEKLLGSDIFTGEPSLLPDSPVGQLHASLLGLSQLLQPEGHHWETQQIPSLSPSQPWQRLLLRFKILRSLQAFVAVAARVFAHGAATLSP

SEQ ID NO: 2396 - protein, 23 aa, Homo sapiens
VKLAGTVPVIFLGLFGVLLKGGD

SEQ ID NO: 2397 - protein, 171 aa, Homo sapiens
ILSETMKYTSYILAFQLCIVLGSLGCYCQDPYVKEAENLKKYFNAGHSDVADNGTLFLGILKNWKEESDRKIMQSQIVSFYFKLFKNFKDDQSIQKSVETIKEDMNVKFFNSNKKKRDDFEKLTNYSVTDLNVQRKAIHELIQVMAELSPAAKTGKRKRSQMLFRGRRASQ

SEQ ID NO: 2398 - protein, 240 aa, Homo sapiens
KVWITVIFIFRVMILVVAAQEVWGDEQEDFVCNTLQPGCKNVCYDHFFPVSHIRLWALQLIFVSTPALLVAMHVAYYRHETTRKFRRGEKRNDFKDIEDIKKQKVRIEGSLWWTYTSSIFFRIIFEAAFMYVFYFLYNGYHLPWVLKCGIDPCPNLVDCFISRPTEKTVFTIFMISASVICMLLNVAELCYLLLKVCFRRSKRAQTQKNHPNHALKESKQNEMNELISDSGQNAITGFPS

SEQ ID NO: 2399 - protein, 22 aa, Homo sapiens
RPWRSWSCTVTCCWLGLALSSL

SEQ ID NO: 2400 - protein, 1465 aa, Homo sapiens
LLRCVLLLGCLHLGRPGAPGDAALPEPNVFLIFSHGLQGCLEAQGGQVRVTPACNTSLPAQRWKWVSRNRLFNLGTMQCLGTGWPGTNTTASLGMYECDREALNLRWHCRTLGDQLSLLLGARTSNISKPGTLERGDQTRSGQWRIYGSEEDLCALPYHEVYTIQGNSHGKPCTIPFKYDNQWFHGCTSTGREDGHLWCATTQDYGKDERWGFCPIKSNDCETFWDKDQLTDSCYQFNFQSTLSWREAWASCEQQGADLLSITEIHEQTYINGLLTGYSSTLWIGLNDLDTSGGWQWSDNSPLKYLNWESDQPDNPSEENCGVIRTESSGGWQNRDCSIALPYVCKKKPNATAEPTPPDRWANVKVECEPSWQPFQGHCYRLQAEKRSWQESKKACLRGGGDLVSIHSMAELEFITKQIKQEVEELWIGLNDLKLQMNFEWSDGSLVSFTHWHPFEPNNFRDSLEDCVTIWGPEGRWNDSPCNQSLPSICKKAGQLSQGAAEEDHGCRKGWTWHSPSCYWLGEDQVTYSEARRLCTDHGSQLVTITNRFEQAFVSSLIYNWEGEYFWTALQDLNSTGSFFWLSGDEVMYTHWNRDQPGYSRGGCVALATGSAMGLWEVKNCTSFRARYICRQSLGTPVTPELPGPDPTPSLTGSCPQGWASDTKLRYCYKVFSSERLQDKKSWVQAQGACQELGAQLLSLASYEEEHFVANMLNKIFGESEPEIHEQHWFWIGLNRRDPRGGQSWRWSDGVGFSYHNFDRSRHDDDDIRGCAVLDLASLQWVAMQCDTQLDWICKIPRGTDVREPDDSPQGRREWLRFQEAEYKFFEHHSTWAQAQRICTWFQAELTSVHSQAELDFLSHNLQKFSRAQEQHWWIGLHTSESDGRFRWTDGSIINFISWAPGKPRPVGKDKKCVYMTASREDWGDQRCLTALPYICKRSNVTKETQPPDLPTTALGGCPSDWIQFLNKCFQVQGQEPQSRVKWSEAQFSCEQQEAQLVTITNPLEQAFITASLPNVTFDLWIGLHASQRDFQWVEQEPLMYANWAPGEPSGPSPAPSGNKPTSCAVVLHSPSAHFTGRWDDRSCTEETHGFICQKGTDPSLSPSPAALPPAPGTELSYLNGTFRLLQKPLRWHDALLLCESRNASLAYVPDPYTQAFLTQAARGLRTPLWIGLAGEEGSRRYSWVSEEPLNYVGWQDGEPQQPGGCTYVDVDGAWRTTSCDTKLQGAVCGVSSGPPPPRRISYHGSCPQGLADSAWIPFREHCYSFHMELLLGHKEARQRCQRAGGAVLSILDEMENVFVWEHLQSYEGQSRGAWLGMNFNPKGGTLVWQDNTAVNYSNWGPPGLGPSMLSHNSCYWIQSNSGLWRPGACTNITMGVVCKLPRAEQSSFSPSALPENPAALVVVLMAVLLLLALLTAALILYRRRQSIERGAFEGARYSRSSSSPTEATEKNILVSDMEMNEQQE

SEQ ID NO: 2401 - protein, 97 aa, Homo sapiens
LLPIMQVSTAALAVLLCTMALCNQVLSAPLAADTPTACCFSYTSRQIPQNFIADYFETSSQCSKPSVIFLTKRGRQVCADPSEEWVQKYVSDLELSA

SEQ ID NO: 2402 - protein, 28 aa, Homo sapiens
LSWMLSVLRFTMRIVFPALAPDPYYSVN

SEQ ID NO: 2403 - protein, 301 aa, Homo sapiens
LVRLRPGCTAGTWAMSPHPTALLGLVLCLAQTIHTQEEDLPRPSISAEPGTVIPLGSHVTFVCRGPVGVQTFRLERDSRSTYNDTEDVSQASPSESEARFRIDSVREGNAGLYRCIYYKPPKWSEQSDYLELLVKESSGGPDSPDTEPGSSAGPTQRPSDNSHNEHAPASQGLKAEHLYILIGVSVVFLFCLLLLVLFCLHRQNQIKQGPPRSKDEEQKPQQRPDLAVDVLERTADKATVNGLPEKDRETDTSALAAGSSQEVTYAQLDHWALTQRTARAVSPQSTKPMAESITYAAVARH

SEQ ID NO: 2404 - protein, 206 aa, Homo sapiens
VQPIMKVLAAGVVPLLLVLHWKHGAGSPLPITPVNATCAIRHPCHNNLMNQIRSQLAQLNGSANALFILYYTAQGEPFPNNLDKLCGPNVTDFPPFHANGTEKAKLVELYRIVVYLGTSLGNITRDQKILNPSALSLHSKLNATADILRGLLSNVLCRLCSKYHVGHVDVTYGPDTSGKDVFQKKKLGCQLLGKYKQIIAVLAQAF

SEQ ID NO: 2405 - protein, 267 aa, Homo sapiens
KEARMLLAWVQAFLVSNMLLAEAYGSGGCFWDNGHLYREDQTSPAPGLRCLNWLDAQSGLASAPVSGAGNHSYCRNPDEDPRGPWCYVSGEAGVPEKRPCEDLRCPETTSQALPAFTTEIQEASEGPGADEVQVFAPANALPARSEAAAVQPVIGISQRVRMNSKEKKDLGTLGYVLGITMMVIIIAIGAGIILGYSYKRGKDLKEQHDQKVCEREMQRITLPLSAFTNPTCEIVDEKTVVVHTSQTPVDPQEGTTPLMGQAGTPGA

SEQ ID NO: 2406 - protein, 147 aa, Homo sapiens
KALIVLGLVLLSVTVQGKVFERCELARTLKRLGMDGYRGISLANWMCLAKWESGYNTRATNYNAGDRSTDYGIFQINSRYWCNDGKTPGAVNACHLSCSALLQDNIADAVACAKRVVRDPQGIRAWVAWRNRCQNRDVRQYVQGCGV

SEQ ID NO: 2407 - protein, 461 aa, Homo sapiens
LTEACKDSRIGGMMKTLLLFVGLLLTWESGQVLGDQTVSDNELQEMSNQGSKYVNKEIQNAVNGVKQIKTLIEKTNEERKTLLSNLEEAKKKKEDALNETRESETKLKELPGVCNETMMALWEECKPCLKQTCMKFYARVCRSGSGLVGRQLEEFLNQSSPFYFWMNGDRIDSLLENDRQQTHMLDVMQDHFSRASSIIDELFQDRFFTREPQDTYHYLPFSLPHRRPHFFFPKSRIVRSLMPFSPYEPLNFHAMFQPFLEMIHEAQQAMDIHFHSPAFQHPPTEFIREGDDDRTVCREIRHNSTGCLRMKDQCDKCREILSVDCSTNNPSQAKLRRELDESLQVAERLTRKYNELLKSYQWKMLNTSSLLEQLNEQFNWVSRLANLTQGEDQYYLRVTTVASHTSDSDVPSGVTEVVVKLFDSDPITVTVPVEVSRKNPKFMETVAEKALQEYRKKHREE

SEQ ID NO: 2408 - protein, 352 aa, Homo sapiens
LAVLFSGALLGLLAAQGTGNDCPHKKSATLLPSFTVTPTVTESTGTTSHRTTKSHKTTTHRTTTTGTTSHGPTTATHNPTTTSHGNVTVHPTSNSTATSQGPSTATHSPATTSHGNATVHPTSNSTATSPGFTSSAHPEPPPPSPSPSPTSKETIGDYTWTNGSQPCVHLQAQIQIRVMYTTQGGGEAWGISVLNPNKTKVQGSCEGAHPHLLLSFPYGHLSFGFMQDLQQKVVYLSYMAVEYNVSFPHAAQWTFSAQNASLRDLQAPLGQSFSCSNSSIILSPAVHLDLLSLRLQAAQLPHTGVFGQSFSCPSDRSILLPLIIGLILLGLLALVLIAFCIIRRRPSAYQAL

SEQ ID NO: 2409 - protein, 599 aa, Homo sapiens
MGLVLALALALALALALSDSRVLWAPAEAHPLSPQGHPARLHRIVPRLRDVFGWGNLTCPICKGLFTAINLGLKKEPNVARVGSVAIKLCNLLKIAPPAVCQSIVHLFEDDMVEVWRRSVLSPSEACGLLLGSTCGHWDIFSSWNISLPTVPKPPPKPPSPPAPGAPVSRILFLTDLHWDHDYLEGTDPDCADPLCCRRGSGLPPASRPGAGYWGEYSKCDLPLRTLESLLSGLGPAGPFDMVYWTGDIPAHDVWHQTRQDQLRALTTVTALVRKFLGPVPVYPAVGNHESTPVNSFPPPFIEGNHSSRWLYEAMAKAWEPWLPAEALRTLRIGGFYALSPYPGLRLISLNMNFCSRENFWLLINSTDPAGQLQWLVGELQAAEDRGDKVHIIGHIPPGHCLKSWSWNYYRIVARYENTLAAQFFGHTHVDEFEVFYDEETLSRPLAVAFLAPSATTYIGLNPGYRVYQIDGNYSGSSHVVLDHETYILNLTQANIPGAIPHWQLLYRARETYGLPNTLPTAWHNLVYRMRGDMQLFQTFWFLYHKGHPPSEPCGTPCRLATLCAQLSARADSPALCRHLMPDGSLPEAQSLWPRPLFC

SEQ ID NO: 2410 - protein, 12 aa, Homo sapiens
MVYLMLKMSLVF

SEQ ID NO: 2411 - protein, 155 aa, Homo sapiens
LRPEKMVLCFPLLLLLLVLWGPVCPLHAWPKRLTKAHWFEIQHIQPSPLQCNRAMSGINNYTQHCKHQNTFLHDSFQNVAAVCDLLSIVCKNRRHNCHQSSKPVNMTDCRLTSGKYPQCRYSAAAQYKFFIVACDPPQKSDPPYKLVPVHLDSIL

SEQ ID NO: 2412 - protein, 353 aa, Homo sapiens
RLAVLFSGALLGLLAAQGTGNDCPHKKSATLLPSFTVTPTVTESTGTTSHRTTKSHKTTTHRTTTTGTTSHGPTTATHNPTTTSHGNVTVHPTSNSTATSQGPSTATHSPATTSHGNATVHPTSNSTATSPGFTSSAHPEPPPPSPSPSPTSKETIGDYTWTNGSQPCVHLQAQIQIRVMYTTQGGGEAWGISVLNPNKTKVQGSCEGAHPHLLLSFPYGHLSFGFMQDLQQKVVYLSYMAVEYNVSFPHAAQWTFSAQNASLRDLQAPLGQSFSCSNSSIILSPAVHLDLLSLRLQAAQLPHTGVFGQSFSCPSDRSILLPLIIGLILLGLLALVLIAFCIIRRRPSAYQAL

SEQ ID NO: 2413 - protein, 19 aa, Homo sapiens
LTGMTVAGVVLLGSLFSRK

SEQ ID NO: 2414 - protein, 615 aa, Homo sapiens
LPGASREPAGRRTPTPSSLCPSTRAPRPFRDPCPAGSAANLPAMETPSQRRATRSGAQASSTPLSPTRITRLQEKEDLQELNDRLAVYIDRVRSLETENAGLRLRITESEEVVSREVSGIKAAYEAELGDARKTLDSVAKERARLQLELSKVREEFKELKARNTKKEGDLIAAQARLKDLEALLNSKEAALSTALSEKRTLEGELHDLRGQVAKLEAALGEAKKQLQDEMLRRVDAENRLQTMKEELDFQKNIYSEELRETKRRHETRLVEIDNGKQREFESRLADALQELRAQHEDQVEQYKKELEKTYSAKLDNARQSAERNSNLVGAAHEELQQSRIRIDSLSAQLSQLQKQLAAKEAKLRDLEDSLARERDTSRRLLAEKEREMAEMRARMQQQLDEYQELLDIKLALDMEIHAYRKLLEGEEERLRLSPSPTSQRSRGRASSHSSQTQGGGSVTKKRKLESTESRSSFSQHARTSGRVAVEEVDEEGKFVRLRNKSNEDQSMGNWQIKRQNGDDPLLTYRFPPKFTLKAGQVVTIWAAGAGATHSPPTDLVWKAQNTWGCGNSLRTALINSTGEEVAMRKLVRSVTVVEDDEDEDGDDLLHHHHVSGSRR

SEQ ID NO: 2415 - protein, 399 aa, Homo sapiens
LLALLRCASTMLSLRVPLAPITDPQQLQLSPLKGLSLVDKENTPPALSGTRVLASKTARRIFQEPTEPKTKAAAPGVEDEPLLRENPRRFVIFPIEYHDIWQMYKKAEASFWTAEEVDLSKDIQHWESLKPEERYFISHVLAFFAASDGIVNENLVERFSQEVQITEARCFYGFQIAMENIHSEMYSLLIDTYIKDPKEREFLFNAIETMPCVKKKADWALRWIGDKEATYGERVVAFAAVEGIFFSGSFASIFWLKKRGLMPGLTFSNELISRDEGLHCDFACLMFKHLVHKPSEERVREIIINAVRIEQEFLTEALPVKLIGMNCTLMKQYIEFVADRLMLELGFSKVFRVENPFDFMENISLEGKTNFFEKRVGEYQRMGVMSSPTENSFTLDADF

SEQ ID NO: 2416 - protein, 44 aa, Homo sapiens
ILVAWMVIALILFLLRPPNLRGSSLPGKPTSPHNGQDPPAPPVD

SEQ ID NO: 2417 - protein, 311 aa, Homo sapiens
VSSDFSSASSMFSHLPFDCVLLLLLLLLTRSSEVEYRAEVGQNAYLPCFYTPAAPGNLVPVCWGKGACPVFECGNVVLRTDERDVNYWTSRYWLNGDFRKGDVSLTIENVTLADSGIYCCRIQIPGIMNDEKFNLKLVIKPAKVTPAPTRQRDFTAAFPRMLTTRGHGPAETQTLGSLPDINLTQISTLANELRDSRLANDLRDSGATIRIGIYIGAGICAGLALALIFGALIFKWYSHSKEKIQNLSLISLANLPPSGLANAVAEGIRSEENIYTIEENVYEVEEPNEYYCYVSSRQQPSQPLGCRFAMP

SEQ ID NO: 2418 - protein, 40 aa, Homo sapiens
VRSLRGLSVSTHLLCFTIYIMNPSMKQKQEEIKENIKVCD

SEQ ID NO: 2419 - protein, 22 aa, Homo sapiens
ILASLLLHLLSLPSPLPRKPPI

SEQ ID NO: 2420 - protein, 35 aa, Homo sapiens [sequence omitted]

SEQ ID NO: 2421 - protein, 41 aa, Homo sapiens
KAALLLLLTFLAKQHTDSFQAALGSLPVDKAQELQAVLGLS

SEQ ID NO: 2422 - protein, 36 aa, Homo sapiens
VDSGLELSWGSLFAAAAAAATAVLGARSPGKKPSHV

SEQ ID NO: 2423 - protein, 43 aa, Homo sapiens
LRPPERLREPRPEGVGVAAAETQPPLFPLFAERRRVASIRQLP

SEQ ID NO: 2424 - protein, 17 aa, Homo sapiens
LALSTLALYVAVVNVHS

SEQ ID NO: 2425 - protein, 235 aa, Homo sapiens
MGAFRALCGLALLCALSLGQRPTGGPGCGPGRLLLGTGTDARCCRVHTTRCCRDYPGEECCSEWDCMCVQPEFHCGDPCCTTCRHHPCPPGQGVQSQGKFSFGFQCIDCASGTFSGGHEGHCKPWTDCTQFGFLTVFPGNKTHNAVCVPGSPPAEPLGWLTVVLLAVAACVLLLTSAQLGLHIWQLRSQCMWPRETQLLLEVPPSTEDARSCQFPEEERGERSAEEKGRLGDLWV

SEQ ID NO: 2426 - protein, 97 aa, Homo sapiens
VCWSLKSTRAAENRRDRTWAPRASPASQVGAGRQATSRPAPGMRVLLAALGLLFLGALRAFPQGCSRHSSAHRGLLTAGSSVSLTTTWMRPTAVQPA

SEQ ID NO: 2427 - protein, 171 aa, Homo sapiens
VGPAPRRRLRPLAALALVLALAPGLPTARAGQTPRPAERGPPVRLFTEEELARYGGEEEDQPIYLAVKGVVFDVTSGKEFYGRGAPYNALTGKDSTRGVAKMSLDPADLTHDTTGLTAKELEALDEVFTKVYKAKYPIVGYTARRILNEDGSPNLDFKPEDQPHFDIKDEF

SEQ ID NO: 2428 - protein, 104 aa, Homo sapiens
LLLTILVCLAHTCFGCFKHLSPLNYKTEEPASDKGSEAEAHMPPPFTPYVPRILNGLASERTALSPQQQQQQTYGAIHNISGTIPGQCLAQSATGSVAAAPQEA

SEQ ID NO: 2429 - protein, 10 aa, Homo sapiens
LPPAWRMSRC

SEQ ID NO: 2430 - protein, 10 aa, Homo sapiens
IFLLLSVLMH

SEQ ID NO: 2431 - protein, 170 aa, Homo sapiens
LVNFILRCGLLLVTLSLAIAKHKQSSFTKSCYPRGTLSQAVDALYIKAAWLKATIPEDRIKNIRLLKKKTKKQFMKNCQFQEQLLSFFMEDVFGQLQLQGCKKIRFVEDFHSLRQKLSHCISCASSAREMKSITRMKRIFYRIGNKGIYKAISELDILLSWIKKLLESSQ

SEQ ID NO: 2432 - protein, 14 aa, Homo sapiens
LMFLLWLCLFSVLL

SEQ ID NO: 2433 - protein, 15 aa, Homo sapiens
LFFIIALYIVCYLTR

SEQ ID NO: 2434 - protein, 91 aa, Homo sapiens
KNRGGCLLLLVLHPSRHSAVSCLGVAAAMARKALPPTHLGQSWFCSCCRDTELAISALRARTATGSPGSCRCTAGPLPCASALESCCCRVT

SEQ ID NO: 2435 - protein, 44 aa, Homo sapiens
IVGILFAVFLILLLMYRMKKKDEGSYDLGKKPIYKKAPTNEFYA

SEQ ID NO: 2436 - protein, 307 aa, Homo sapiens
LQARSPSVAAMASPQLCRALVSAQWVAEALRAPRAGQPLQLLDASWYLPKLGRDARREFEERHIPGAAFFDIDQCSDRTSPYDHMLPGAEHFAEYAGRLGVGAATHVVIYDASDQGLYSAPRVWWMFRAFGHHAVSLLDGGLRHWLRQNLPLSSGKSQPAPAEFRAQLDPAFIKTYEDIKENLESRRFQVVDSRATGRFRGTEPEPRDGIEPGHIPGTVNIPFTDFLSQEGLEKSPEEIRHLFQEKKVDLSKPLVATCGSGVTACHVALGAYLCGKPDVPIYDGSWVEWYMRARPEDVISEGRGKTH

SEQ ID NO: 2437 - protein, 249 aa, Homo sapiens
LLTQRTLLSLVLALLFPSMASMAAIGSCSKEYRVLLGQLQKQTDLMQDTSRLLDPYIRIQGLDVPKLREHCRERPGAFPSEETLRGLGRRGFLQTLNATLGCVLHRLADLEQRLPKAQDLERSGLNIEDLEKLQMARPNILGLRNNIYCMAQLLDNSDTAEPTKAGRGASQPPTPTPASDAFQRKLEGCRFLHGYHRFMHSVGRVFSKWGESPNRSRRHSPHQALRKGVRRTRPSRKGKRLMTRGQLPR

SEQ ID NO: 2438 - protein, 578 aa, Homo sapiens
MAFILLVLLCLLLYYCRRKCLKPRQHHRKLQLPAGLESSKRDQSTSMSHINLLFSRRASEFPGPLSVTSHGRPEAPGTKELMSGVHLEMMSPGGEGDLHTPMLKLSYSTSQEFSSREELLSCKEEDKSQISFDNLTPSGTLGKDYHKSVEVFPLKARKSMEREGYESSGNDDYRGSYNTVLSQPLFEKQDREGPASTGSKLTIQEHLYPAPSSPEKEQLLDRRPTECMMSRSVDHLERPTSFPRPGQLICCSSVDQVNDSVYRKVLPALVIPAHYMKLPGDHSYVSQPLVVPADQQLEIERLQAELSNPHAGIFPHPSSQIQPQPLSSQAISQQHLQDAGTREWSPQNASMSESLSIPASLNDAALAQMNSEVQLLTEKALMELGGGKPLPHPRAWFVSLDGRSNAHVRHSYIDLQRAGRNGSNDASLDSGVDMNEPKSARKGRGDALSLQQNYPPVQEHQQKEPRAPDSTAYTQLVYLDDVEQSGSECGTTVCTPEDSALRCLLEGSSRRSGGQLPSLQEETTRRTADAPSEPAASPHQRRSAHEEEEDDDDDDQGEDKKSPWQKREERPLMAFNIK

SEQ ID NO: 2439 - protein, 28 aa, Homo sapiens
MSYLHWGISITLRFLLLMRTLSAYAKKF

SEQ ID NO: 2440 - protein, 328 aa, Homo sapiens
ICDSTMGLSNILFVMAFLLSGAAPLKIQAYFNETADLPCQFANSQNQSLSELVVFWQDQENLVLNEVYLGKEKFDSVHSKYMGRTSFDSDSWTLRLHNLQIKDKGLYQCIIHHKKPTGMIRIHQMNSELSVLANFSQPEIVPISNITENVYINLTCSSIHGYPEPKKMSVLLRTKNSTIEYDGVMQKSQDNVTELYDVSISLSVSFPDVTSNMTIFCILETDKTRLLSSPFSIELEDPQPPPDHIPWITAVLPTVIICVMVFCLILWKWKKKKRPRNSYKCGTNTMEREESEQTKKREKIHIPERSDEAQRVFKSSKTSSCDKSDTCF

SEQ ID NO: 2441 - protein, 40 aa, Homo sapiens
MDECTHSSWVSWLLFGVCYTPVLCPVSSEKVCICYSSESS

SEQ ID NO: 2442 - protein, 256 aa, Homo sapiens
KKMAISGVPVLGFFIIAVLMSAQESWAIKEEHVIIQAEFYLNPDQSGEFMFDFDGDEIFHVDMAKKETVWRLEEFGRFASFEAQGALANIAVDKANLEIMTKRSNYTPITNVPPEVTVLTNSPVELREPNVLICFIDKFTPPVVNVTWLRNGKPVTTGVSETVFLPREDHLFRKFHYLPFLPSTEDVYDCRVEHWGLDEPLLKHWEFDAPSPLPETTENVVCALGLTVGLVGIIIGTIFIIKGLRKSNAAERRGPL

SEQ ID NO: 2443 - protein, 72 aa, Homo sapiens
RLLFLLLTIVFCQILMAEEGVPAPLPPEDAPNAASLAPTPVSAVLEPFNLTSEPSDYALDLSTFLQQHPAAF

SEQ ID NO: 2444 - protein, 11 aa, Homo sapiens
MGVVMFITLLG

SEQ ID NO: 2445 - protein, 35 aa, Homo sapiens
KMLMMMALLVPLVYTIKRHKWSVLKSRKLAYRPPK

SEQ ID NO: 2446 - protein, 28 aa, Homo sapiens
ILAKDFAIYFSAFSGRISLLPEGLGRAL

SEQ ID NO: 2447 - protein, 449 aa, Homo sapiens
LLLVLQLALLPAATQGKKVVLGKKGDTVELTCTASQKKSIQFHWKNSNQIKILGNQGSFLTKGPSKLNDRADSRRSLWDQGNFPLIIKNLKIEDSDTYICEVEDQKEEVQLLVFGLTANSDTHLLQGQSLTLTLESPPGSSPSVQCRSPRGKNIQGGKTLSVSQLELQDSGTWTCTVLQNQKKVEFKIDIVVLAFQKASSIVYKKEGEQVEFSFPLAFTVEKLTGSGELWWQAERASSSKSWITFDLKNKEVSVKRVTQDPKLQMGKKLPLHLTLPQALPQYAGSGNLTLALEAKTGKLHQEVNLVVMRATQLQKNLTCEVWGPTSPKLMLSLKLENKEAKVSKREKAVWVLNPEAGMWQCLLSDSGQVLLESNIKVLPTWSTPVQPMALIVLGGVAGLLLFIGLGIFFCVRCRHRRRQAERMSQIKRLLSEKKTCQCPHRFQKTCSPI

SEQ ID NO: 2448 - protein, 9 aa, Homo sapiens
RVIIMLTWT

SEQ ID NO: 2449 - protein, 370 aa, Homo sapiens
MGLVLALALALALALALSDSRVLWAPAEAHPLSPQGHPARLHRIVPRLRDVFGWGNLTCPICKGLFTAINLGLKKEPNVARVGSVAIKLCNLLKIAPPAVCQSIVHLFEDDMVEVWRRSVLSPSEACGLLLGSTCGHWDIFSSWNISLPTVPKPPPKPPSPPAPGAPVSRILFLTDLHWDHDYLEGTDPDCADPLCCRRGSGLPPASRPGAGYWGEYSKCDLPLRTLESLLSGLGPAGPFDMVYWTGDIPAHDVWHQTRQDQLRALTTVTALVRKFLGPVPVYPAVGNHESTPVNSFPPPFIEGNHSSRWLYEAMAKAWEPWLPAEALRTLRYLSSVETQEGKRKNWGVLCSFPIPRSPPHLSQYEFLFP

SEQ ID NO: 2450 - protein, 61 aa, Homo sapiens [sequence omitted]

SEQ ID NO: 2451 - protein, 1100 aa, Homo sapiens
MPALALKGELLLLSLLLLLEPQISQGLVVTPPGPELVLNVSSTFVLTCSGSAPVVWERMSQEPPQEMAKAQDGTFSSVLTLTNLTGLDTGEYFCTHNDSRGLETDERKRLYIFVPDPTVGFLPNDAEELFIFLTEITEITIPCRVTDPQLVVTLHEKKGDVALPVPYDHQRGFSGIFEDRSYICKTTIGDREVDSDAYYVYRLQVSSINVSVNAVQTVVRQGENITLMCIVIGNEVVNFEWTYPRKESGRLVEPVTDFLLDMPYHIRSILHIPSAELEDSGTYTCNVTESVNDHQDEKAINITVVESGYVRLLGEVGTLQFAELHRSRTLQVVFEAYPPPTVLWFKDNRTLGDSSAGEIALSTRNVSETRYVSELTLVRVKVAEAGHYTMRAFHEDAEVQLSFQLQINVPVRVLELSESHPDSGEQTVRCRGRGMPQPNIIWSACRDLKRCPRELPPTLLGNSSEEESQLETNVTYWEEEQEFEVVSTLRLQHVDRPLSVRCTLRNAVGQDTQEVIVVPHSLPFKVVVISAILALVVLTIISLIILIMLWQKKPRYEIRWKVIESVSSDGHEYIYVDPMQLPYDSTWELPRDQLVLGRTLGSGAFGQVVEATAHGLSHSQATMKVAVKMLKSTARSSEKQALMSELKIMSHLGPHLNVVNLLGACTKGGPIYIITEYCRYGDLVDYLHRNKHTFLQHHSDKRRPPSAELYSNALPVGLPLPSHVSLTGESDGGYMDMSKDESVDYVPMLDMKGDVKYADIESSNYMAPYDNYVPSAPERTCRATLINESPVLSYMDLVGFSYQVANGMEFLASKNCVHRDLAARNVLICEGKLVKICDFGLARDIMRDSNYISKGSTFLPLKWMAPESIFNSLYTTLSDVWSFGILLWEIFTLGGTPYPELPMNEQFYNAIKRGYRMAQPAHASDEIYEIMQKCWEEKFEIRPPFSQLVLLLERLLGEGYKKKYQQVDEEFLRSDHPAILRSQARLPGFHGLRSPLDTSSVLYTAVQPNEGDNDYIIPLPDPKPEVADEGPLEGSPSLASSTLNEVNTSSTISCDSPLEPQDEPEPEPQLELQVEPEPELEQLPDSGCPAPRAEAEDSFL

SEQ ID NO: 2452 - protein, 421 aa, Homo sapiens
ISAFTFCRKLYFLLLHAKFLPLDLFGSVAEKPDIPGLPETSHKLNRESGLNKDAFPQYIHNMLSTSRSRFIRNTNESGEEVTTFFDYDYGAPCHKFDVKQIGAQLLPPLYSLVFIFGFVGNMLVVLILINCKKLKCLTDIYLLNLAISDLLFLITLPLWAHSAANEWVFGNAMCKLFTGLYHIGYFGGIFFIILLTIDRYLAIVHAVFALKARTVTFGVVTSVITWLVAVFASVPGIIFTKCQKEDSVYVCGPYFPRGWNNFHTIMRNILGLVLPLLIMVICYSGILKTLLRCRNEKKRHRAVRVIFTIMIVYFLFWTPYNIVILLNTFQEFFGLSNCESTSQLDQATQVTETLGMTHCCINPIIYAFVGEKFRRYLSVFFRKHITKRFCKQCPVFYRETVDGVTSTNTPSTGEQEVSAGL

SEQ ID NO: 2453 - protein, 225 aa, Homo sapiens
IAMKFVPCLLLVTLSCLGTLGQAPRQKQGSTGEEFHFQTGGRDSCTMRPSSLGQGAGEVWLRVDCRNTDQTYWCEYRGQPSMCQAFAADPKPYWNQALQELRRLHHACQGAPVLRPSVCREAGPQAHMQQVTSSLKGSPEPNQQPEAGTPSLRPKATVKLTEATQLGKDSMEELGKAKPTTRPTAKPTQPGPRPGGNEEAKKKAWEHCWKPFQALCAFLISFFRG

SEQ ID NO: 2454 - protein, 101 aa, Homo sapiens
VGFLVLMVVLGLVRIHSLHRRVSGAGGPPGASSDPKDPDLFWDDSALTIIVNPMESYQNRQSCVTGAVGGQQEDEDSSDSEVADSPSSDERRIIETPPHRY

SEQ ID NO: 2455 - protein, 66 aa, Homo sapiens
LVFLQKFPPWAVVEVVTVIVAAPAAATATTRDGGGCSRNCNIPEVFPELLGCPNRRGPPGGVRGAD

SEQ ID NO: 2456 - protein, 55 aa, Homo sapiens
IGETIARWEVFLFLAILLQRVEFSVPLGVKVDMTPIYGLTMKHACCEHFQMQLRS

SEQ ID NO: 2457 - protein, 22 aa, Homo sapiens
LFTGCPGLRARRRPSSVADGRI

SEQ ID NO: 2458 - protein, 367 aa, Homo sapiens
VEMLGQVVTLILLLLLKVYQGKGCQGSADHVVSISGVPLQLQPNSIQTKVDSIAWKKLLPSQNGFHHILKWENGSLPSNTSNDRFSFIVKNLSLLIKAAQQQDSGLYCLEVTSISGKVQTATFQVFVFDKVEKPRLQGQGKILDRGRCQVALSCLVSRDGNVSYAWYRGSKLIQTAGNLTYLDEEVDINGTHTYTCNVSNPVSWESHTLNLTQDCQNAHQEFRFWPFLVIIVILSALFLGTLACFCVWRRKRKEKQSETSPKEFLTIYEDVKDLKTRRNHEQEQTFPGGGSTIYSMIQSQSSAPTSQEPAYTLYSLIQPSRKSGSRKRNHSPSFNSTIYEVIGKSQPKAQNPARLSRKELENFDVYS

SEQ ID NO: 2459 - protein, 235 aa, Homo sapiens
VQSCKQVYRSIAMKFVPCLLLVTLSCLGTLGQAPRQKQGSTGEEFHFQTGGRDSCTMRPSSLGQGAGEVWLRVDCRNTDQTYWCEYRGQPSMCQAFAADPKPYWNQALQELRRLHHACQGAPVLRPSVCREAGPQAHMQQVTSSLKGSPEPNQQPEAGTPSLRPKATVKLTEATQLGKDSMEELGKAKPTTRPTAKPTQPGPRPGGNEEAKKKAWEHCWKPFQALCAFLISFFRG

SEQ ID NO: 2460 - protein, 256 aa, Homo sapiens
LFFLIVGAYMTHVCFNMEIIGGKEVSPHSRPFMASIQYGGHHVCGGVLIDPQWVLTAAHCQYRFTKGQSPTVVLGAHSLSKNEASKQTLEIKKFIPFSRVTSDPQSNDIMLVKLQTAAKLNKHVKMLHIRSKTSLRSGTKCKVTGWGATDPDSLRPSDTLREVTVTVLSRKLCNSQSYYNGDPFITKDMVCAGDAKGQKDSCKGDSGGPLICKGVFHAIVSGGHECGVATKPGIYTLLTKKYQTWIKSNLVPPHTN

SEQ ID NO: 2461 - protein, 140 aa, Homo sapiens
VWSFGVLLWEIFTLGGSPYPGVPVEELFKLLKEGHRMDKPSNCTNELYMMMRDCWHAVPSQRPTFKQLVEDLDRIVALTSNQEYLDLSMPLDQYSPSFPDTRSSTCSSGEDSVFSHEPLPEEPCLPRHPAQLANGGLKRR

SEQ ID NO: 2462 - protein, 172 aa, Homo sapiens
LWRLISGTLGIICLSLMSTLGILLKNSFTKLSIEPAFTPGPNIELQKDSDCCSCQEKWVGYRCNCYFISSEQKTWNESRHLCASQKSSLLQLQNTDELDFMSSSQQFYWIGLSYSEEHTAWLWENGSALSQYLFPSFETFNTKNCIAYNPNGNALDESCEDKNRYICKQQLI

SEQ ID NO: 2463 - protein, 16 aa, Homo sapiens
RTQIPALLLLVLHGHL

SEQ ID NO: 2464 - protein, 22 aa, Homo sapiens
IFLFVCIFFPLLVEVRFPPTRP

SEQ ID NO: 2465 - protein, 80 aa, Homo sapiens
LPYWLLVFLAALNALLQWLLRPLVLYAPLLNPYTLAVANTTFTVSTDKAQRHFGYEPLFSWEDSRTRTILWVQAATGSAQ

SEQ ID NO: 2466 - protein, 17 aa, Homo sapiens
ICLLMFLLWLCLFSVLL

SEQ ID NO: 2467 - protein, 27 aa, Homo sapiens
LKLFLSLQNLILALDLRRESLTRDETQ

SEQ ID NO: 2468 - protein, 19 aa, Homo sapiens
MITKVVFPEQGLAVLLWMC

SEQ ID NO: 2469 - protein, 153 aa, Homo sapiens
MVKYLLLSILGLAFLSEAAARKIPKVGHTFFQKPESCPPVPGGSMKLDIGIINENQRVSMSRNIESRSTSPWNYTVTWDPNRYPSEVVQAQCRNLGCINAQGKEDISMNSVPIQQETLVVRRKHQGCSVSFQLEKVLVTVGCTCVTPVIHHVQ

SEQ ID NO: 2470 - protein, 46 aa, Homo sapiens
MTLFCLLQLFYHLQRERCFLEPRARFYAAEIASALGYLHSLNIVYR

SEQ ID NO: 2471 - protein, 390 aa, Homo sapiens
LVISSVFFSSLLLSRFSMQEKDASSQGFLPHFQHFATQAIHVGQDPEQWTSRAVVPPISLSTTFKQGAPGQHSGFEYSRSGNPTRNCLEKAVAALDGAKYCTNRYFRQVASEFGLKISFVDCSKIKLLEAAITPETKLVWIETPTNPTQKVIDIEGCAHIVHKHGDIILVVDNTFMSPYFQRPLALGADISMYSATKYMNGHSDVVMGLVSVNCESLHNRLRFLQNSLGAVPSPIDCYLCNRGLKTLHVRMEKHFKNGMAVAQFLESNPWVEKVIYPGLPSHPQHELVKRQCTGCTGMVTFYIKGTLQHAEIFLKNLKLFTLAESLGGFESLAELPAIMTHASVLKNDRDVLGISDTLIRLSVGLEDEEDLLEDLDQALKAAHPPSGSHS

SEQ ID NO: 2472 - protein, 263 aa, Homo sapiens
RMPFSHLSTYSLVWVMAAVVLCTAQVQVVTQDEREQLYTPASLKCSLQNAQEALIVTWQKKKAVSPENMVTFSENHGVVIQPAYKDKINITQLGLQNSTITFWNITLEDEGCYMCLFNTFGFGKISGTACLTVYVQPIVSLHYKFSEDHLNITCSATARPAPMVFWKVPRSGIENSTVTLSHPNGTTSVTSILHIKDPKNQVGKEVICQVLHLGTVTDFKQTVNKGYWFSVPLLLSIVSLVILLVLISILLYWKRHRNQDREP

SEQ ID NO: 2473 - protein, 276 aa, Homo sapiens
KCPYLNFFQLLVLAGLSHFCSGVIHVTKEVKEVATLSCGHNVSVEELAQTRIYWQKEKKMVLTMMSGDMNIWPEYKNRTIFDITNNLSIVILALRPSDEGTYECVVLKYEKDAFKREHLAEVTLSVKADFPTPSISDFEIPTSNIRRIICSTSGGFPEPHLSWLENGEELNAINTTVSQDPETELYAVSSKLDFNMTTNHSFMCLIKYGHLRVNQTFNWNTTKQEHFPDNLLPSWAITLISVNGIFVICCLTYCFAPRCRERRRNERLRRESVRPV

SEQ ID NO: 2474 - protein, 67 aa, Homo sapiens
KGSTLALVIITLELERLMPGWCAPISDLLKKAQVGDMQYSCCKELVMQQLRSLQSSSCTDNFVSPAN

SEQ ID NO: 2475 - protein, 587 aa, Homo sapiens
LHASQCSPRPACNPARPPQLCPLQLQPRAAPPRPDTSSPACSSRMAAAKAEMQLMSPLQISDPFGSFPHSPTMDNYPKLEEMMLLSNGAPQFLGAAGAPEGSGSNSSSSSSGGGGGGGGGSNSSSSSSTFNPQADTGEQPYEHLTAESFPDISLNNEKVLVETSYPSQTTRLPPITYTGRFSLEPAPNSGNTLWPEPLFSLVSGLVSMTNPPASSSSAPSPAASSASASQSPPLSCAVPSNDSSPIYSAAPTFPTPNTDIFPEPQSQAFPGSAGTALQYPPPAYPAAKGGFQVPMIPDYLFPQQQGDLGLGTPDQKPFQGLESRTQQPSLTPLSTIKAFATQSGSQDLKALNTSYQSQLIKPSRMRKYPNRPSKTPPHERPYACPVESCDRRFSRSDELTRHIRIHTGQKPFQCRICMRNFSRSDHLTTHIRTHTGEKPFACDICGRKFARSDERKRHTKIHLRQKDKKADKSVVASSATSSLSSYPSPVATSYPSPVTTSYPSPATTSYPSPVPTSFSSPGSSTYPSPVHSGFPSPSVATTYSSVPPAFPAQVSSFPSSAVTNSFSASTGLSDMTATFSPRTIEIC

SEQ ID NO: 2476 - protein, 276 aa, Homo sapiens
TRVPVLRLLLGSALVGRLLDSLKRDYAGKPQPPIKSERRNPPSYAMAGKKVLIVYAHQEPKSFNGSLKNVAVDELSRQGCTVTVSDLYAMNLEPRATDKDITGTLSNPEVFNYGVETHEAYKQRSLASDITDEQKKVREADLVIFQFPLYWFSVPAILKGWMDRVLCQGFAFDIPGFYDSGLLQGKLALLSVTTGGTAEMYTKTGVNGDSRYFLWPLQHGTLHFCGFKVLAPQISFAPEIASEEERKGMVAAWSQRLQTIWKEEPIPCTAHWHFGQ

SEQ ID NO: 2477 - protein, 325 aa, Homo sapiens
LDGTMAPAFLLLLLLWPQGCVSGPSADSVYTKVRLLEGETLSVQCSYKGYKNRVEGKVWCKIRKKKCEPGFARVWVKGPRYLLQDDAQAKVVNITMVALKLQDSGRYWCMRNTSGILYPLMGFQLDVSPAPQTERNIPFTHLDNILKSGTVTTGQAPTSGPDAPFTTGVMVFTPGLITLPRLLASTRPASKTGYSFTATSTTSQGPRRTMGSQTVTASPSNARDSSAGPESISTKSGDLSTRSPTTGLCLTSRSLLNRLPSMPSIRHQDVYSTVLGVVLTLLVLMLIMVYGFWKKRHMASYSMCSDPSTRDPPGRPEPYVEVYLI

SEQ ID NO: 2478 - protein, 80 aa, Homo sapiens [sequence omitted]

SEQ ID NO: 2479 - protein, 239 aa, Homo sapiens
VWITVIFIFRVMILVVAAQEVWGDEQEDFVCNTLQPGCKNVCYDHFFPVSHIRLWALQLIFVSTPALLVAMHVAYYRHETTRKFRRGEKRNDFKDIEDIKKQKVRIEGSLWWTYTSSIFFRIIFEAAFMYVFYFLYNGYHLPWVLKCGIDPCPNLVDCFISRPTEKTVFTIFMISASVICMLLNVAELCYLLLKVCFRRSKRAQTQKNHPNHALKESKQNEMNELISDSGQNAITGFPS

SEQ ID NO: 2480 - protein, 554 aa, Homo sapiens
IAGVCGWLLLSGPCGVGLDLDSRLLGASAMRRSEVLAEESIVCLQKALNHLREIWELIGIPEDQRLQRTEVVKKHIKEEGETTILQLEKDLRTQVELMRKQKKERKQELKLLQEQDQELCEILCMPHYDIDSASVPSLEELNQFRQHVTTLRETKASRREEFVSIKRQIILCMEALDHTPDTSFERDVVCEDEDAFCLSLENIATLQKLLRQLEMQKSQNEAVCEGLRTQIRELWDRLQIPEEEREAVATIMSGSKAKVRKALQLEVDRLEELKMQNMKKVIEAIRVELVQYWDQCFYSQEQRQAFAPFCAEDYTESLLQLHDAEIVRLKNYYEVHKELFEGVQKWEETWRLFLEFERKASDPNRFTNRGGNLLKEEKQRAKLQKMLPKLEEELKARIELWEQEHSKAFMVNGQKFMEYVAEQWEMHRLEKERAKQERQLKNKKQTETEMLYGSAPRTPSKRRGLAPNTPGKARKLNTTTMSNATANSSIRPIFGGTVYHSPVSRLPPSGSKPVAASTCSGKKTPRTGRHGANKENLELNGSILSARTFKGFQI

SEQ ID NO: 2481 - protein, 44 aa, Homo sapiens
IIMIGTLTALQWFIYDSVKVYFRLPRPPPPEMPESLKKKLGLTQ

SEQ ID NO: 2482 - protein, 138 aa, Homo sapiens
LLLLAILAVALAVSPAAGSSPGKPPRLVGGPMDASVEEEGVRRALDFAVGEYNKASNDMYHSRALQVVRARKQIVAGVNYFLDVELGRTTCTKTQPNLDNCPFHDQPHLKRKAFCSFQIYAVPWQGTMTLSKSTCQDA

SEQ ID NO: 2483 - protein, 500 aa, Homo sapiens
LCFLLLAVAMSFFGSALSIDETRAHLLLKEKMMRLGGRLVLNTKEELANERLMTLKIAEMKEAMRTLIFPPSMHFFQAKHLIERSQVFNILRMMPKGAALHLHDIGIVTMDWLVRNVTYRPHCHICFTPRGIMQFRFAHPTPRPSEKCSKWILLEDYRKRVQNVTEFDDSLLRNFTLVTQHPEVIYTNQNVVWSKFETIFFTISGLIHYAPVFRDYVFRSMQEFYEDNVLYMEIRARLLPVYELSGEHHDEEWSVKTYQEVAQKFVETHPEFIGIKIIYSDHRSKDVAVIAESIRMAMGLRIKFPTVVAGFDLVGHEDTGHSLHDYKEALMIPAKDGVKLPYFFHAGETDWQGTSIDRNILDALMLNTTRIGHGFALSKHPAVRTYSWKKDIPIEVCPISNQVLKLVSDLRNHPVATLMATGHPMVISSDDPAMFGAKGLSYDFYEVFMGIGGMKADLRTLKQLAMNSIKYSTLLESEKNTFMEIWKKRWDKFIADVATK

SEQ ID NO: 2484 - protein, 147 aa, Homo sapiens
TALLSLFGIPLWYHSQSPRVILQPDVHPGNCWAFQGPQGFAVVRLSARIRPTAVTLEHVPKALSPNSTISSAPKDFAIFGFDEDLQQEGTLLGKFTYDQDGEPIQTFHFQAPTMATYQVVELRILTNWGHPEYTCIYRFRVHGEPAH

SEQ ID NO: 2485 - protein, 3285 aa, Homo sapiens
MKSPRPHLLLPLLLLLLLLLGAGVPGAWGQAGSLDLQIDEEQPAGTLIGDISAGLPAGTAAPLMYFISAQEGSGVGTDLAIDEHSGVVRTARVLDREQRDRYRFTAVTPDGATVEVTVRVADINDHAPAFPQARAALQVPEHTAFGTRYPLEPARDADAGRLGTQGYALSGDGAGETFRLETRPGPDGTPVPELVVTGELDRENRSHYMLQLEAYDGGSPPRRAQALLDVTLLDINDHAPAFNQSRYHAVVSESLAPGSPVLQVFASDADAGVNGAVTYEINRRQSEGDGPFSIDAHTGLLQLERPLDFEQRRVHELVVQARDGGAHPELGSAFVTVHVRDANDNQPSMTVIFLSADGSPQVSEAAPPGQLVARISVSDPDDGDFAHVNVSLEGGEGHFALSTQDSVIYLVCVARRLDREERDAYNLRVTATDSGSPPLRAEAAFVLHVTDVNDNAPAFDRQLYRPEPLPEVALPGSFVVRVTARDPDQGTNGQVTYSLAPGAHTHWFSIDPTSGIITTAASLDYELEPQPQLIVVATDGGLPPLASSATVSVALQDVNDNEPQFQRTFYNASLPEGTQPGTCFLQVTATDADSGPFGLLSYSLGAGLGSSGSPPFRIDAHSGDVCTTRTLDRDQGPSSFDFTVTAVDGGGLKSMVYVKVFLSDENDNPPQFYPREYAASISAQSPPGTAVLRLRAHDPDQGSHGRLSYHILAGNSPPLFTLDEQSGLLTVAWPLARRANSVVQLEIGAEDGGGLQAEPSARVDISIVPGTPTPPIFEQLQYVFSVPEDVAPGTSVGIVQAHNPPGRLAPVTLSLSGGDPRGLFSLDAVSGLLQTLRPLDRELLGPVLELEVRAGSGVPPAFAVARVRVLLDDVNDNSPAFPAPEDTVLLPPNTAPGTPIYTLRALDPDSGVNSRVTFTLLAGGGGAFTVDPTTGHVRLMRPLGPSGGPAHELELEARDGGSPPRTSHFRLRVVVQDVGTRGLAPRFNSPTYRVDLPSGTTAGTQVLQVQAQAPDGGPITYHLAAEGASSPFGLEPQSGWLWVRAALDREAQELYILKVMAVSGSKAELGQQTGTATVRVSILNQNEHSPRLSEDPTFLAVAENQPPGTSVGRVFATDRDSGPNGRLTYSLQQLSEDSKAFRIHPQTGEVTTLQTLDREQQSSYQLLVQVQDGGSPPRSTTGTVHVAVLDLNDNSPTFLQASGAAGGGLPIQVPDRVPPGTLVTTLQAKDPDEGENGTILYTLTGPGSELFSLHPHSGELLTAAPLIRAERPHYVLTLSAHDQGSPPRSASLQLLVQVLPSARLAEPPPDLAERDPAAPVPVVLTVTAAEGLRPGSLLGSVAAPEPAGVGALTYTLVGGADPEGTFALDAASGRLYLARPLDFEAGPPWRALTVRAEGPGGAGARLLRVQVQVQDENEHAPAFARDPLALALPENPEPGAALYTFRASDADGPGPNSDVRYRLLRQEPPVPALRLDARTGALSAPRGLDRETTPALLLLVEATDRPANASRRRAARVSARVFVTDENDNAPVFASPSRVRLPEDQPPGPAALHVVARDPDLGEAARVSYRLASGGDGHFRLHSSTGALSVVRPLDREQRAEHVLTVVASDHGSPPRSATQVLTVSVADVNDEAPTFQQQEYSVLLRENNPPGTSLLTLRATDPDVGANGQVTYGGVSSESFSLDPDTGVLTTLRALDREEQEEINLTVYAQDRGSPPQLTHVTVRVAVEDENDHAPTFGSAHLSLEVPEGQDPQTLTMLRASDPDVGANGQLQYRILDGDPSGAFVLDLASGEFGTMRPLDREVEPAFQLRIEARDGGQPALSATLLLTVTVLDANDHAPAFPVPAYSVEVPEDVPAGTLLLQLQAHDPDAGANGHVTYYLGAGTAGAFLLEPSSGELRTAAALDREQCPSYTFSVSAVDGAAAGPLSTTVSVTITVRDVNDHAPTFPTSPLRLRLPRPGPSFSTPTLALATLRAEDRDAGANASILYRLAGTPPPGTTVDSYTGEIRVARSPVALGPRDRVLFIVATDLGRPARSATGVIIVGLQGEAERGPRFPRASSEATIRENAPPGTPIVSPRAVHAGGTNGPITYSILSGNEKGTFSIQPSTGAITVRSAEGLDFEVSPRLRLVLQAESGGAFAFTVLTLTLQDANDNAPRFLRPHYVAFLPESRPLEGPLLQVEADDLDQGSGGQISYSLAASQPARGLFHVDPTTGTITTTAILDREIWAETRLVLMATDRGSPALVGSATLTVMVIDTNDNRPTIPQPWELRVSEDALLGSEIAQVTGNDVDSGPVLWYVLSPSGPQDPFSVGRYGGRVSLTGPLDFEQCDRYQLQLLAHDGPHEGRANLTVLVEDVNDNAPAFSQSLYQVMLLEHTPPGSAILSVSATDRDSGANGHISYHLASPADGFSVDPNNGTLFTIVGTVALGHDGSGAVDVVLEARDHGAPGRAARATVHVQLQDQNDHAPSFTLSHYRVAVTEDLPPGSTLLTLEATDADGSRSHAAVDYSIISGNWGRVFQLEPRLAEAGESAGPGPRALGCLVLLEPLDFESLTQYNLTVAAADRGQPPQSSVVPVTVTVLDVNDNPPVFTRASYRVTVPEDTPVGAELLHVEASDADPGPHGLVRFTVSSGDPSGLFELDESSGTLRLAHALDCETQARHQLVVQAADPAGAHFALAPVTIEVQDVNDHGPAFPLNLLSTSVAENQPPGTLVTTLHAIDGDAGAFGRLRYSLLEAGPGPEGREAFALNSSTGELRARVPFDYEHTESFRLLVGAADAGNLSASVTVSVLVTGEDEYDPVFLAPAFHFQVPEGARRGHSLGHVQATDEDGGADGLVLYSLATSSPYFGINQTTGALYLRVDSRAPGSGTATSGGGGRTRREAPRELRLEVIARGPLPGSRSATVPVTVDITHTALGLAPDLNLLLVGAVAASLGVVVVLALAALVLGLVRARSRKAEAAPGPMSQAAPLASDSLQKLGREPPSPPPSEHLYHQTLPSYGGPGAGGPYPRGGSLDPSHSSGRGSAEAAEDDEIRMINEFPRVASVASSLAARGPDSGIQQDADGLSDTSCEPPAPDTWYKGRKAGLLLPGAGATLYREEGPPATATAFLGGCGLSPAPTGDYGFPADGKPCVAGALTAIVAGEEELRGSYNWDYLLSWCPQFQPLASVFTEIARLKDEARPCPPAPRIDPPPLITAVAHPGAKSVPPKPANTAAARAIFPPASHRSPISHEGSLSSAAMSPSFSPSLSPLAARSPVVSPFGVAQGPSASALSAESGLEPPDDTELHI

SEQ ID NO: 2486 - protein, 150 aa, Homo sapiens
MQLLSCIALSLALVTNSAPTSSSTKKTQLQLEHLLLDLQMILNGINNYKNPKLTRMLTFKFYMPKKATELKHLQCLEEELKPLEEVLNLAQSKNFHLRPRDLISNINVIVLELKGSETTFMCEYADETATIVEFLNRWITFCQSIISTLT

SEQ ID NO: 2487 - protein, 58 aa, Homo sapiens
IFFILLIIFLSWIILKHRKGNNAHENPKEVAIHLHSQGGSSVHPRTLQTNEENSRVLP

SEQ ID NO: 2488 - protein, 145 aa, Homo sapiens
KMLLAMVLTSALLLCSVAGQGCPTLAGILDINFLINKMQEDPASKCHCSANVTSCLCLGIPSDNCTRPCFSERLSQMTNTTMQTRYPLIFSRVKKSVEVLKNNKCPYFSCEQPCNQTTAGNALTFLKSLLEIFQKEKMRGMRGKI

SEQ ID NO: 2489 - protein, 34 aa, Homo sapiens
KSNFSQKEKSFPFLLHSLGKLTLKGCSSLNTVLS

SEQ ID NO: 2490 - protein, 52 aa, Homo sapiens
LIFFSWCVWWLFLSVEGKRRYHPRLSPTPLQNGFSDTPGSEGVGSPGCARSK

SEQ ID NO: 2491 - protein, 1603 aa, Homo sapiens
LLLLLLLLALCGCPAPAAASPLLLFANRRDVRLVDAGGVKLESTIVVSGLEDAAAVDFQFSKGAVYWTDVSEEAIKQTYLNQTGAAVQNVVISGLVSPDGLACDWVGKKLYWTDSETNRIEVANLNGTSRKVLFWQDLDQPRAIALDPAHGYMYWTDWGETPRIERAGMDGSTRKIIVDSDIYWPNGLTIDLEEQKLYWADAKLSFIHRANLDGSFRQKVVEGSLTHPFALTLSGDTLYWTDWQTRSIHACNKRTGGKRKEILSALYSPMDIQVLSQERQPFFHTRCEEDNGGCSHLCLLSPSEPFYTCACPTGVQLQDNGRTCKAGAEEVLLLARRTDLRRISLDTPDFTDIVLQVDDIRHAIAIDYDPLEGYVYWTDDEVRAIRRAYLDGSGAQTLVNTEINDPDGIAVDWVARNLYWTDTGTDRIEVTRLNGTSRKILVSEDLDEPRAIALHPVMGLMYWTDWGENPKIECANLDGQERRVLVNASLGWPNGLALDLQEGKLYWGDAKTDKIEVINVDGTKRRTLLEDKLPHIFGFTLLGDFIYWTDWQRRSIERVHKVKASRDVIIDQLPDLMGLKAVNVAKVVGTNPCADRNGGCSHLCFFTPHATRCGCPIGLELLSDMKTCIVPEAFLVFTSRAAIHRISLETNNNDVAIPLTGVKEASALDFDVSNNHIYWTDVSLKTISRAFMNGSSVEHVVEFGLDYPEGMAVDWMGKNLYWADTGTNRIEVARLDGQFRQVLVWRDLDNPRSLALDPTKGYIYWTEWGGKPRIVRAFMDGTNCMTLVDKVGRANDLTIDYADQRLYWTDLDTNMIESSNMLGQERVVIADDLPHPFGLTQYSDYIYWTDWNLHSIERADKTSGRNRTLIQGHLDFVMDILVFHSSRQDGLNDCMHNNGQCGQLCLAIPGGHRCGCASHYTLDPSSRNCSPPTTFLLFSQKSAISRMIPDDQHSPDLILPLHGLRNVKAIDYDPLDKFIYWVDGRQNIKRAKDDGTQPFVLTSLSQGQNPDRQPHDLSIDIYSRTLFWTCEATNTINVHRLSGEAMGVVLRGDRDKPRAIVVNAERGYLYFTNMQDRAAKIERAALDGTEREVLFTTGLIRPVALVVDNTLGKLFWVDADLKRIESCDLSGANRLTLEDANIVQPLGLTILGKHLYWIDRQQQMIERVEKTTGDKRTRIQGRVAHLTGIHAVEEVSLEEFSAHPCARDNGGCSHICIAKGDGTPRCSCPVHLVLLQNLLTCGEPPTCSPDQFACATGEIDCIPGAWRCDGFPECDDQSDEEGCPVCSAAQFPCARGQCVDLRLRCDGEADCQDRSDEADCDAICLPNQFRCASGQCVLIKQQCDSFPDCIDGSDELMCEITKPPSDDSPAHSSAIGPVIGIILSLFVMGGVYFVCQRVVCQRYAGANGPFPHEYVSGTPHVPLNFIAPGGSQHGPFTGIACGKSMMSSVSLMGGRGGVPLYDRNHVTGASSSSSSSTKATLYPPILNPPPSPATDPSLYNMDMFYSSNIPATARPYRPYIIRGMAPPTTPCSTDVCDSDYSASRWKASKYYLDLNSDSDPYPPPPTPHSQYLSAEDSCPPSPATERSYFHLFPPPPSPCTDSS

SEQ ID NO: 2492 - protein, 18 aa, Homo sapiens
MPRTQIPALLLLVLHGHL

SEQ ID NO: 2493 - protein, 21 aa, Homo sapiens
MVMMMMIMTLMIFNRIKIEFF

SEQ ID NO: 2494 - protein, 642 aa, Homo sapiens
LGLPLRLRLLLLLWAAAASAQGHLRSGPRIFAVWKGHVGQDRVDFGQTEPHTVLFHEPGSSSVWVGGRGKVYLFDFPEGKNASVRTVNIGSTKGSCLDKRDCENYITLLERRSEGLLACGTNARHPSCWNLVNGTVVPLGEMRGYAPFSPDENSLVLFEGDEVYSTIRKQEYNGKIPRFRRIRGESELYTSDTVMQNPQFIKATIVHQDQAYDDKIYYFFREDNPDKNPEAPLNVSRVAQLCRGDQGGESSLSVSKWNTFLKAMLVCSDAATNKNFNRLQDVFLLPDPSGQWRDTRVYGVFSNPWNYSAVCVYSLGDIDKVFRTSSLKGYHSSLPNPRPGKCLPDQQPIPTETFQVADRHPEVAQRVEPMGPLKTPLFHSKYHYQKVAVHRMQASHGETFHVLYLTTDRGTIHKVVEPGEQEHSFAFNIMEIQPFRRAAAIQTMSLDAERRKLYVSSQWEVSQVPLDLCEVYGGGCHGCLMSRDPYCGWDQGRCISIYSSERSVLQSINPAEPHKECPNPKPDKAPLQKVSLAPNSRYYLSCPMESRHATYSWRHKENVEQSCEPGHQSPNCILFIENLTAQQYGHYFCEAQEGSYFREAQHWQLLPEDGIMAEHLLGHACALAASLWLGVLPTLTLGLLVH

SEQ ID NO: 2495 - protein, 297 aa, Homo sapiens
LPWALLLLWVPGCFALSKCRTVAGPVGGSLSVQCPYEKEHRTLNKYWCRPPQIFLCDKIVETKGSAGKRNGRVSIRDSPANLSFTVTLENLTEEDAGTYWCGVDTPWLRDFHDPVVEVEVSVFPASTSMTPASITAAKTSTITTAFPPVSSTTLFAVGATHSASIQEETEEVVNSQLPLLLSLLALLLLLLVGASLLAWRMFQKWIKAGDHSELSQNPKQAATQSELHYANLELLMWPLQEKPAPPREVEVEYSTVASPREELHYASVVFDSNTNRIAAQRPREEEPDSDYSVIRKT

SEQ ID NO: 2496 - protein, 268 aa, Homo sapiens
TKEARMLLAWVQAFLVSNMLLAEAYGSGGCFWDNGHLYREDQTSPAPGLRCLNWLDAQSGLASAPVSGAGNHSYCRNPDEDPRGPWCYVSGEAGVPEKRPCEDLRCPETTSQALPAFTTEIQEASEGPGADEVQVFAPANALPARSEAAAVQPVIGISQRVRMNSKEKKDLGTLGYVLGITMMVIIIAIGAGIILGYSYKRGKDLKEQHDQKVCEREMQRITLPLSAFTNPTCEIVDEKTVVVHTSQTPVDPQEGTTPLMGQAGTPGA

SEQ ID NO: 2497 - protein, 284 aa, Homo sapiens
LATAETRMCVGARRLGRGPCAALLLLGLGLSTVTGLHCVGDTYPSNDRCCHECRPGNGMVSRCSRSQNTVCRPCGPGFYNDVVSSKPCKPCTWCNLRSGSERKQLCTATQDTVCRCRAGTQPLDSYKPGVDCAPCPPGHFSPGDNQACKPWTNCTLAGKHTLQPASNSSDAICEDRDPPATQPQETQGPPARPITVQPTEAWPRTSQGPSTRPVEVPGGRAVAAILGLGLVLGLLGPLAILLALYLLRRDQRLPPDAHKPPGGGSFRTPIQEEQADAHSTLAKI

SEQ ID NO: 2498 - protein, 16 aa, Homo sapiens
MIMEMVYLMLKMSLVF

SEQ ID NO: 2499 - protein, 333 aa, Homo sapiens
ISRPDTAQLDGTMAPAFLLLLLLWPQGCVSGPSADSVYTKVRLLEGETLSVQCSYKGYKNRVEGKVWCKIRKKKCEPGFARVWVKGPRYLLQDDAQAKVVNITMVALKLQDSGRYWCMRNTSGILYPLMGFQLDVSPAPQTERNIPFTHLDNILKSGTVTTGQAPTSGPDAPFTTGVMVFTPGLITLPRLLASTRPASKTGYSFTATSTTSQGPRRTMGSQTVTASPSNARDSSAGPESISTKSGDLSTRSPTTGLCLTSRSLLNRLPSMPSIRHQDVYSTVLGVVLTLLVLMLIMVYGFWKKRHMASYSMCSDPSTRDPPGRPEPYVEVYLI

SEQ ID NO: 2500 - protein, 253 aa, Homo sapiens [sequence omitted]

SEQ ID NO: 2501 - protein, 253 aa, Homo sapiens
MWQLLLPTALLLLVSAGMRTDLPKAVVFLEPQWYRVLEKDSVTLKCQGAYSPEDNSTQWFHNESLISSQASSYFIDAATVDDSGEYRCQTNLSTLSDPVQLEVHIGWLLLQAPRWVFKEEDPIHLRCHSWKNTALHKVTYLQNGKGRKYFHHNSDFYIPKATLKDSGSYFCRGLFGSKNVSSETVNITITQGLAVSTISSFFPPGYQVSFCLVMVLLFAVDTGLYFSVKTNIRSSTRDWKDHKFKWRKDPQDK

SEQ ID NO: 2502 - protein, 1902 aa, Homo sapiens
MVSVVGPMGLLVVLLVGGCAAEEPPRFIKEPKDQIGVSGGVASFVCQATGDPKPRVTWNKKGKKVNSQRFETIEFDESAGAVLRIQPLRTPRDENVYECVAQNSVGEITVHAKLTVLREDQLPSGFPNIDMGPQLKVVERTRTATMLCAASGNPDPEITWFKDFLPVDPSASNGRIKQLRSGALQIESSEETDQGKYECVATNSAGVRYSSPANLYVRVRRVAPRFSILPMSHEIMPGGNVNITCVAVGSPMPYVKWMQGAEDLTPEDDMPVGRNVLELTDVKDSANYTCVAMSSLGVIEAVAQITVKSLPKAPGTPMVTENTATSITITWDSGNPDPVSYYVIEYKSKSQDGPYQIKEDITTTRYSIGGLSPNSEYEIWVSAVNSIGQGPPSESVVTRTGEQAPASAPRNVQARMLSATTMIVQWEEPVEPNGLIRGYRVYYTMEPEHPVGNWQKHNVDDSLLTTVGSLLEDETYTVRVLAFTSVGDGPLSDPIQVKTQQGVPGQPMNLRAEARSETSITLSWSPPRQESIIKYELLFREGDHGREVGRTFDPTTSYVVEDLKPNTEYAFRLAARSPQGLGAFTPVVRQRTLQSKPSAPPQDVKCVSVRSTAILVSWRPPPPETHNGALVGYSVRYRPLGSEDPEPKEVNGIPPTTTQILLEALEKWTQYRITTVAHTEVGPGPESSPVVVRTDEDVPSAPPRKVEAEALNATAIRVLWRSPAPGRQHGQIRGYQVHYVRMEGAEARGPPRIKDVMLADAQEMVITNLQPETAYSITVAAYTMKGDGARSKPKVVVTKGAVLGRPTLSVQQTPEGSLLARWEPPAGTAEDQVLGYRLQFGREDSTPLATLEFPPSEDRYTASGVHKGATYVFRLAARSRGGLGEEAAEVLSIPEDTPRGHPQILEAAGNASAGTVLLRWLPPVPAERNGAIVKYTVAVREAGALGPARETELPAAAEPGAENALTLQGLKPDTAYDLQVRAHTRRGPGPFSPPVRYRTFLRDQVSPKNFKVKMIMKTSVLLSWEFPDNYNSPTPYKIQYNGLTLDVDGRTTKKLITHLKPHTFYNFVLTNRGSSLGGLQQTVTAWTAFNLLNGKPSVAPKPDADGFIMVYLPDGQSPVPVQSYFIVMVPLRKSRGGQFLTPLGSPEDMDLEELIQDISRLQRRSLRHSRQLEVPRPYIAARFSVLPPTFHPGDQKQYGGFDNRGLEPGHRYVLFVLAVLQKSEPTFAASPFSDPFQLDNPDPQPIVDGEEGLIWVIGPVLAVVFIICIVIAILLYKNKPDSKRKDSEPRTKCLLNNADLAPHHPKDPVEMRRINFQTPGMLSHPPIPIADMAEHTERLKANDSLKLSQEYESIDPGQQFTWEHSNLEVNKPKNRYANVIAYDHSRVILQPIEGIMGSDYINANYVDGYRCQNAYIATQGPLPETFGDFWRMVWEQRSATIVMMTRLEEKSRIKCDQYWPNRGTETYGFIQVTLLDTIELATFCVRTFSLHKNGSSEKREVRQFQFTAWPDHGVPEYPTPFLAFLRRVKTCNPPDAGPIVVHCSAGVGRTGCFIVIDAMLERIKPEKTVDVYGHVTLMRSQRNYMVQTEDQYSFIHEALLEAVGCGNTEVPARSLYAYIQKLAQVEPGEHVTGMELEFKRLANSKAHTSRFISANLPCNKFKNRLVNIMPYESTRVCLQPIRGVEGSDYINASFIDGYRQQKAYIATQGPLAETTEDFWRMLWENNSTIVVMLTKLREMGREKCHQYWPAERSARYQYFVVDPMAEYNMPQYILREFKVTDARDGQSRTVRQFQFTDWPEQGVPKSGEGFIDFIGQVHKTKEQFGQDGPISVHCSAGVGRTGVFITLSIVLERMRYEGVVDIFQTVKMLRTQRPAMVQTEDEYQFCYQAALEYLGSFDHYAT

SEQ ID NO: 2503 - protein, 1196 aa, Homo sapiens [sequence omitted]

SEQ ID NO: 2504 - protein, 137 aa, Homo sapiens
MVTVALSVALLALLKWYSTSAFSRLEKLGLRHPKPSPFIGNLTFFRQGFWESQMELRKLYGPLCGYYLGRRMFIVISEPDMIKQVLVENFSNFTNRMPQSIMPNSRHHVASRGMWPGGRRLACYLHPFRMAEGIAEV

SEQ ID NO: 2505 - protein, 33 aa, Homo sapiens
LALLTLLGALGIANSFLDEYLDLNIAKKLRRQF

SEQ ID NO: 2506 - protein, 21 aa, Homo sapiens
MSLLFIASVFMLHIWGKYTRS

SEQ ID NO: 2507 - protein, 65 aa, Homo sapiens
LVIAVAIATVIVISLVMLRKRQYGTISHGIVEVDPMLTPEERHLNKMQNHGYENPTYKYLEQMQI

SEQ ID NO: 2508 - protein, 31 aa, Homo sapiens
LAFIVGLLILLSRRFRCGGNKKRRQINEDEP

SEQ ID NO: 2509 - protein, 197 aa, Homo sapiens
ILLLLWLIAPSRACTCVPPHPQTAFCNSDLVIRAKFVGTPEVNQTTLYQRYEIKMTKMYKGFQALGDAADIRFVYTPAMESVCGYFHRSHNRSEEFLIAGKLQDGLLHITTCSFVAPWNSLSLAQRRGFTKTYTVGCEECTVFPCLSIPCKLQSGTHCLWTDQLLQGSEKGFQSRHLACLPREPGLCTWQSLRSQIA

SEQ ID NO: 2510 - protein, 27 aa, Homo sapiens
LGVLFMAVSLGFMFANWATGQSRMSGH

SEQ ID NO: 2511 - protein, 739 aa, Homo sapiens
MHLRLFCILLAAVSGAEGWGYYGCDEELVGPLYARSLGASSYYSLLTAPRFARLHGISGWSPRIGDPNPWLQIDLMKKHRIRAVATQGSFNSWDWVTRYMLLYGDRVDSWTPFYQRGHNSTFFGNVNESAVVRHDLHFHFTARYIRIVPLAWNPRGKIGLRLGLYGCPYKADILYFDGDDAISYRFPRGVSRSLWDVFAFSFKTEEKDGLLLHAEGAQGDYVTLELEGAHLLLHMSLGSSPIQPRPGHTTVSAGGVLNDQHWHYVRVDRFGRDVNFTLDGYVQRFILNGDFERLNLDTEMFIGGLVGAARKNLAYRHNFRGCIENVIFNRVNIADLAVRRHSRITFEGKVAFRCLDPVPHPINFGGPHNFVQVPGFPRRGRLAVSFRFRTWDLTGLLLFSRLGDGLGHVELTLSEGQVNVSIAQSGRKKLQFAAGYRLNDGFWHEVNFVAQENHAVISIDDVEGAEVRVSYPLLIRTGTSYFFGGCPKPASRWDCHSNQTAFHGCMELLKVDGQLVNLTLVEGRRLGFYAEVLFDTCGITDRCSPNMCEHDGRCYQSWDDFICYCELTGYKGETCHTPLYKESCEAYRLSGKTSGNFTIDPDGSGPLKPFVVYCDIRENRAWTVVRHDRLWTTRVTGSSMERPFLGAIQYWNASWEEVSALANASQHCEQWIEFSCYNSRLLNTAAFGLAEMRSSTSTGEAPSLGSSAVPVVWTGAVWTLPCTATVTLTSPSGELTRDC

SEQ ID NO: 2512 - protein, 1215 aa, Homo sapiens
MEHLRHSPGPGGQRLLLPSMLLALLLLLAPSPGHATRVVYKVPEEQPPNTLIGSLAADYGFPDVGHLYKLEVGAPYLRVDGKTGDIFTTETSIDREGLRECQNQLPGDPCILEFEVSITDLVQNGSPRLLEGQIEVQDINDNTPNFASPVITLAIPENTNIGSLFPIPLASDRDAGPNGVASYELQAGPEAQELFGLQVAEDQEEKQPQLIVMGNLDRERWDSYDLTIKVQDGGSPPRASSALLRVTVLDTNDNAPKFERPSYEAELSENSPIGHSVIQVKANDSDQGANAEIEYTFHQAPEVVRRLLRLDRNTGLITVQGPVDREDLSTLRFSVLAKDRGTNPKSARAQVVVTVKDMNDNAPTIEIRGIGLVTHQDGMANISEDVAEETAVALVQVSDRDEGENAAVTCVVAGDVPFQLRQASETGSDSKKKYFLQTTTPLDYEKVKDYTIEIVAVDSGNPPLSSTNSLKVQVVDVNDNAPVFTQSVTEVAFPENNKPGEVIAEITASDADSGSNAELVYSLEPEPAAKGLFTISPETGEIQVKTSLDREQRESYELKVVAADRGSPSLQGTATVLVNVLDCNDNDPKFMLSGYNFSVMENMPALSPVGMVTVIDGDKGENAQVQLSVEQDNGDFVIQNGTGTILSSLSFDREQQSTYTFQLKAVDGGVPPRSAYVGVTINVLDENDNAPYITAPSNTSHKLLTPQTRLGETVSQVAAEDFDSGVNAELIYSIAGGNPYGLFQIGSHSGAITLEKEIERRHHGLHRLVVKVSDRGKPPRYGTALVHLYVNETLANRTLLETLLGHSLDTPLDIDIAGDPEYERSKQRGNILFGVVAGVVAVALLIALAVLVRYCRQREAKSGYQAGKKETKDLYAPKPSGKASKGNKSKGKKSKSPKPVKPVEDEDEAGLQKSLKFNLMSDAPGDSPRIHLPLNYPPGSPDLGRHYRSNSPLPSIQLQPQSPSASKKHQVVQDLPPANTFVGTGDTTSTGSEQYSDYSYRTNPPKYPSKQLPHRRVTFSATSQAQELQDPSQHSYYDSGLEESETPSSKSSSGPRLGPLALPEDHYERTTPDGSIGEMEHPENDLRPLPDVAMTGTCTRECSEFGHSDTCWMPGQSSPSRRTKSSALKLSTFVPYQDRGGQEPAGAGSPSPPEDRNTKTAPVRLLPSYSAFSHSSHDSCKDSATLEEIPLTQTSDFPPAATPASAQTAKREIYL

SEQ ID NO: 2513 - protein, 475 aa, Homo sapiens [sequence omitted]

SEQ ID NO: 2514 - protein, 1506 aa, Homo sapiens
MLLGLAALHIYITVSATRPSQKISLKNVEKEWGLEPFLPPSLLQVIKEKNLRKSLSQQLKAHQTHPSCGTKGSAIQAKLQYLRILNELPTFTGVLFNTVGLDEKQSATTLLVGPRHGISHVIDLKTNLTTVLSEFSKISKIQLFRENQGVARVETSIMDAKPLVLLMEWPEATNFACLIAGYCRLLLDSRKMVFSRPASQPLPPPMIKADYMHSAHRPVTGGHLGKKESSYVGSVGTSPRKSSRCTPPPADSELVSFCYLHMREQRKEQESRTDVNENLIFFEETRPRTKSDPTSKSSGQGYEVVPDDFDAASLDHEPCASRARSYTLDNSLGAEALNFYCDSCKAKLQEQLGPRKGGKPGSSRDNIVDLMSLPPPGSEEEEEEEDETTSLLPAIAAPPPGFRDNSSDEDDPKRRAVQSQEQGRHLRGLLYDEIPVTLIDSVQTRTVRDHAQELDDALVSTLQALEALAASEDGPHPPPPQTAGLIVLATITPESSLDSGHETNSSELTDMSEMMSAMKQHQNTTYFLAQHLNKDSLLARKDLPFRIQSCAAQAVLTAPYSLGRPDPNPSLQPIATGQSPGPPGARRKLPQSEGQVQGERTYSLAVHPALSPQLSEQKNLSLLSPVPEDKGPGHTRAGLEMSLRAATSSLSEEQVSELRDNLPKEVRLSPKLILDPKSSVTPAIISAALQQVVHNKSLVTAGGALGNPPSRGERRLEASMGRPEVSMMSSSASKNLKFKISPSAPETSWNSQHQLGAEVSSSPRAPTGSRADSLHLSQQEDSLPVQNFPPKSYLLRTSRESVGKQATGEVAGKGGPVGGKPTLQKQGTISSQGEKAQLESTPKRSKLEETSLVPRATYPMALQSPSCQSRSHSPSCQPHGHSPSSQSRGQSPSCQPRGQSPLRSQAASRQVSTMPSRKLETTLNGAHSTSEGPAKPKSSRGPFRLRNLFSATFPTRQKKETDERQAQLQKVKQYELEFLEELLKPPSQGELPGTEYLQPPAPGRCSCQLRSSPVQQGPGMSREQRRSCDCKRICRGGRPQATQTPVPSLRGRERDRVLPSQRQPEAGPGVSLSSPINVQRIRSTSLESRECRSDPESGVSCLTTCASGGECLGAPNYRKLMRRYSISELDQGDRASLTSDVYPHPPLGMLPREAKEVEASLPIALGPKSRSLESPTLGDPSYVQVAPETKGPRQMAVFSLPEEVYRKPAELDEDSESSKCCSIRYCFYYRKCDMADDASDGKDELSYSIPMKILPGMKLDEQVVPVVSRTLQVLDAATCSSSSPEASRTQEIDLRVSTFEGSLAKINALRAHAYGLPDGFLAARLDTNELLTVLRQCVASPEARAPKPYVSQISEYKLELALKFKELRASCRRVANVDKSPTHMLAAITGSFQVLSSLIETFVRLVFIVRSEAQRQELLAKVEEVVRNYTFLLRAAEESTARNLNQQQQQQQQQQQQQQQQQQQQQQQQQQQVAAAAGAATEHPPGSPTSATVMSTFTHSLKTLIK

SEQ ID NO: 2515 - protein, 18 aa, Homo sapiens
LVKTMKIIYNATLLFLVS

SEQ ID NO: 2516 - protein, 1912 aa, Homo sapiens
MEEIKKVLLLVLGCAVQCERKEEFIERIKQLDIETQAGIVAHIQEVTHNQENVFDLQWLELPDVAPEELEALSRSMVLHLRRLIDQRDECTELIVDLTQERDYLQAQHPPSPIKSSSADSTPSPTSSLSSEDKQHLAVELADTKARLRRVRQELEDKTEQLVDTRHEVDQLVLELQKVKQENIQLAADARSARAYRDELDSLREKANRVERLELELTRCKEKLHDVDFYKARMEELREDNIILIETKAMLEEQLTAARARGDKVHELEKENLQLKSKLHDLELDRDTDKKRIEELLEENMVLEIAQKQSMNESAHLGWELEQLSKNADLSDASRKSFVFELNECASSRILKLEKENQSLQSTIQGLRDASLVLEESGLKCGELEKENHQLSKKIEKLQTQLEREKQSNQDLETLSEELIREKEQLQSDMETLKADKARQIKDLEQEKDHLNRAMWSLRERSQVSSEARMKDVEKENKALHQTVTEANGKLSQLEFEKRQLHRDLEQAKEKGERAEKLERELQRLQEENGRLARKVTSLETATEKVEALEHESQGLQLENRTLRKSLDTLQNVSLQLEGLERDNKQLDAENLELRRLVETMRFTSTKLAQMERENQQLEREKEELRKNVDLLKALGKKSERLELSYQSVSAENLRLQQSLESSSHKTQTLESELGELEAERQALRRDLEALRLANAQLEGAEKDRKALEQEVAQLEKDKKLLEKEAKRLWQQVELKDAVLDDSTAKLSAVEKESRALDKELARCRDAAGKLKELEKDNRDLTKQVTVHARTLTTLREDLVLEKLKSQQLSSELDKLSQELEKVGLNRELLLQEDDSGSDTKYKILEGRNESALKTTLAMKEEKIVLLEAQMEEKASLNRQLESELQMLKKECETLRQNQGEGQHLQNSFKHPAGKTAASHQGKEAWGPGHKEATMELLRVKDRAIELERNNAALQAEKQLLKEQLQHLETQNVTFSSQILTLQKQSAFLQEHNTTLQTQTAKLQVENSTLSSQSAALTAQYTLLQNHHTAKETENESLQRQQEQLTAAYEALLQDHEHLGTLHERQSAEYEALIRQHSCLKTLHRNLELEHKELGERHGDMLKRKAELEEREKVLTTEREALQQEQRTNALAMGENQRLRGELDRVNFLHHQLKGEYEELHAHTKELKTSLNNAQLELNRWQARFDELKEQHQTMDISLTKLDNHCELLSRLKGNLEEENHHLLSQIQLLSQQNQMLLEQNMENKEQYHEEQKQYIDKLNALRRHKEKLEEKIMDQYKFYDPPPKKKNHWIGAKALVKLIKPKKEGSRERLKSTVDSPPWQLESSDPASPAASQPLRSQAENPDTPALGSNCAEERDAHNGSVGKGPGDLKPKRGSPHRGSLDRTDASTDLAMRSWPSELGSRTCSTSATTTAPSNSTPIARHPGRTKGYNSDDNLCEPSLEFEVPNHRQYVSRPSSLESSRNTSSNSSPLNLKGSSEQLHGRSESFSSEDLIPSRDLATLPREASTPGRNALGRHEYPLPRNGPLPQEGAQKRGTAPPYVGVRPCSASPSSEMVTLEEFLEESNRSSPTHDTPSCRDDLLSDYFRKASDPPAIGGQPGPPAKKEGAKMPTNFVAPTVKMAAPTSEGRPLKPGQYVKPNFRLTEAEAPPSVAPRQAQPPQSLSLGRPRQAPVPPASHAPASRSASLSRAFSLASADLLRASGPEACKQESPQKLGAPEALGGRETGSHTLQSPAPPSSHSLARERTPLVGKAGSSCQGPGPRSRPLDTRRFSLAPPKEERLAPLHQSATAPAIATAGAGAAAAGSGSNSQLLHFSPAAAPAARTKPKAPPRSGEVATITPVRAGLSLSEGDGVPGQGCSEGLPAKSPGRSPDLAPHLGRALEDCSRGSVSKSSPASPEPGGDPQTVWYEYGCV

SEQ ID NO: 2517 - protein, 1038 aa, Homo sapiens
MEHLRHSPGPGGQRLLLPSMLLALLLLLAPSPGHATRVVYKVPEEQPPNTLIGSLAADYGFPDVGHLYKLEVGAPYLRVDGKTGDIFTTETSIDREGLRECQNQLPGDPCILEFEVSITDLVQNGSPRLLEGQIEVQDINDNTPNFASPVITLAIPENTNIGSLFPIPLASDRDAGPNGVASYELQAGPEAQELFGLQVAEDQEEKQPQLIVMGNLDRERWDSYDLTIKVQDGGSPPRASSALLRVTVLDTNDNAPKFERPSYEAELSENSPIGHSVIQVKANDSDQGANAEIEYTFHQAPEVVRRLLRLDRNTGLITVQGPVDREDLSTLRFSVLAKDRGTNPKSARAQVVVTVKDMNDNAPTIEIRGIGLVTHQDGMANISEDVAEETAVALVQVSDRDEGENAAVTCVVAGDVPFQLRQASETGSDSKKKYFLQTTTPLDYEKVKDYTIEIVAVDSGNPPLSSTNSLKVQVVDVNDNAPVFTQSVTEVAFPENNKPGEVIAEITASDADSGSNAELVYSLEPEPAAKGLFTISPETGEIQVKTSLDREQRESYELKVVAADRGSPSLQGTATVLVNVLDCNDNDPKFMLSGYNFSVMENMPALSPVGMVTVIDGDKGENAQVQLSVEQDNGDFVIQNGTGTILSSLSFDREQQSTYTFQLKAVDGGVPPRSAYVGVTINVLDENDNAPYITAPSNTSHKLLTPQTRLGETVSQVAAEDFDSGVNAELIYSIAGGNPYGLFQIGSHSGAITLEKEIERRHHGLHRLVVKVSDRGKPPRYGTALVHLYVNETLANRTLLETLLGHSLDTPLDIDIAGDPEYERSKQRGNILFGVVAGVVAVALLIALAVLVRYCRQREAKSGYQAGKKETKDLYAPKPSGKASKGNKSKGKKSKSPKPVKPVEDEDEAGLQKSLKFNLMSDAPGDSPRIHLPLNYPPGSPDLGRHYRSNSPLPSIQLQPQSPSASKKHQVVQDLPPANTFVGTGDTTSTGSEQYSDYSYRTNPPKYPSKQVGQPFQLSTPQPLPHPYHGAIWTEVWE

SEQ ID NO: 2518 - protein, 1187 aa, Homo sapiens
MPKKKRLSAGRVPLILFLCQMISALEVPLDPKLLEDLVQPPTITQQSPKDYIIDPRENIVIQCEAKGKPPPSFSWTRNGTHFDIDKDPLVTMKPGTGTLIINIMSEGKAETYEGVYQCTARNERGAAVSNNIVVRPSRSPLWTKEKLEPITLQSGQSLVLPCRPPIGLPPPIIFWMDNSFQRLPQSERVSQGLNGDLYFSNVLPEDTREDYICYARFNHTQTIQQKQPISVKVISAKSSRERPPTFLTPEGNASNKEELRGNVLSLECIAEGLPTPIIYWAKEDGMLPKNRTVYKNFEKTLQIIHVSEADSGNYQCIAKNALGAIHHTISVRVKAAPYWITAPQNLVLSPGEDGTLICRANGNPKPRISWLTNGVPIEIAPDDPSRKIDGDTIIFSNVQERSSAVYQCNASNEYGYLLANAFVNVLAEPPRILTPANTLYQVIANRPALLDCAFFGSPLPTIEWFKGAKGSALHEDIYVLHENGTLEIPVAQKDSTGTYTCVARNKLGMAKNEVHLEIKDPTWIVKQPEYAVVQRGSMVSFECKVKHDHTLSLTVLWLKDNRELPSDERFTVDKDHLVVADVSDDDSGTYTCVANTTLDSVSASAVLSVVAPTPTPAPVYDVPNPPFDLELTDQLDKSVQLSWTPGDDNNSPITKFIIEYEDAMHKPGLWHHQTEVSGTQTTAQLKLSPYVNYSFRVMAVNSIGKSLPSEASEQYLTKASEPDKNPTAVEGLGSEPDNLVITWKPLNGFESNGPGLQYKVSWRQKDGDDEWTSVVVANVSKYIVSGTPTFVPYLIKVQALNDMGFAPEPAVVMGHSGEDLPMVAPGNVRVNVVNSTLAEVHWDPVPLKSIRGHLQGYRIYYWKTQSSSKRNRRHIEKKILTFQGSKTHGMLPGLEPFSHYTLNVRVVNGKGEGPASPDRVFNTPEGVPSAPSSLKIVNPTLDSLTLEWDPPSHPNGILTEYTLKYQPINSTHELGPLVDLKIPANKTRWTLKNLNFSTRYKFYFYAQTSAGSGSQITEEAVTTVDEAGILPPDVGAGKAMASRQVDIATQGWFIGLMCAVALLILILLIVCFIRRNKGGKYPVKEKEDAHADPEIQPMKEDDGTFGEYSDAEDHKPLKKGSRTPSDRTVKKEDSDDSLVDYGEGVNGQFNEDGSFIGQYSGKKEKEPAEGNESSEAPSPVNAMNSFV

SEQ ID NO: 2519 - protein, 404 aa, Homo sapiens
MTVSAATRVMLLFSVAGWGHLSLAGDHILASNWGAKAALQLEGPGLHSLTSCSTAKSLGKKPCVGMREAELSRVRVGPKQVNSPLAPQTCSAHGGRTGVLLSPPPKATCVFLSSNLQPGEEMEACEELALALSRGLQLDTQRSSRDSLQCSSGYSTQTTTPCCSEDTIPSQVSDYDYFSVSGDQEADQQEFDKSSTIPRNSDISQSYRRMFQAKRPASTAGLPTTLGPAMVTPGVATIRRTPSTKPSVRRGTIGAGPIPIKTPVIPVKTPTVPDLPGVLPAPPDGPEERGEHSPESPSVGEGPQGVTSMPSSMWSGQASVNPPLPGPKPSIPEEHRQAIPESEAEDQEREPPSATVSPGQIPESDPADLSPRDTPQGEDMLNAIRRGVKLKKTTTNDRSAPRFS

SEQ ID NO: 2520 - protein, 15 aa, Homo sapiens
LSLVFYSPWLLLISR

SEQ ID NO: 2521 - protein, 265 aa, Homo sapiens
VIRMPFSHLSTYSLVWVMAAVVLCTAQVQVVTQDEREQLYTPASLKCSLQNAQEALIVTWQKKKAVSPENMVTFSENHGVVIQPAYKDKINITQLGLQNSTITFWNITLEDEGCYMCLFNTFGFGKISGTACLTVYVQPIVSLHYKFSEDHLNITCSATARPAPMVFWKVPRSGIENSTVTLSHPNGTTSVTSILHIKDPKNQVGKEVICQVLHLGTVTDFKQTVNKGYWFSVPLLLSIVSLVILLVLISILLYWKRHRNQDREP

SEQ ID NO: 2522 - protein, 565 aa, Homo sapiens
LQLQPRAAPPRPDTSSPACSSRMAAAKAEMQLMSPLQISDPFGSFPHSPTMDNYPKLEEMMLLSNGAPQFLGAAGAPEGSGSNSSSSSSGGGGGGGGGSNSSSSSSTFNPQADTGEQPYEHLTAESFPDISLNNEKVLVETSYPSQTTRLPPITYTGRFSLEPAPNSGNTLWPEPLFSLVSGLVSMTNPPASSSSAPSPAASSASASQSPPLSCAVPSNDSSPIYSAAPTFPTPNTDIFPEPQSQAFPGSAGTALQYPPPAYPAAKGGFQVPMIPDYLFPQQQGDLGLGTPDQKPFQGLESRTQQPSLTPLSTIKAFATQSGSQDLKALNTSYQSQLIKPSRMRKYPNRPSKTPPHERPYACPVESCDRRFSRSDELTRHIRIHTGQKPFQCRICMRNFSRSDHLTTHIRTHTGEKPFACDICGRKFARSDERKRHTKIHLRQKDKKADKSVVASSATSSLSSYPSPVATSYPSPVTTSYPSPATTSYPSPVPTSFSSPGSSTYPSPVHSGFPSPSVATTYSSVPPAFPAQVSSFPSSAVTNSFSASTGLSDMTATFSPRTIEIC

SEQ ID NO: 2523 - protein, 20 aa, Homo sapiens
LAGWAQPVSKSPNTFSSSST

SEQ ID NO: 2524 - protein, 149 aa, Homo sapiens
VLCFPLLLLLLVLWGPVCPLHAWPKRLTKAHWFEIQHIQPSPLQCNRAMSGINNYTQHCKHQNTFLHDSFQNVAAVCDLLSIVCKNRRHNCHQSSKPVNMTDCRLTSGKYPQCRYSAAAQYKFFIVACDPPQKSDPPYKLVPVHLDSIL

SEQ ID NO: 2525 - protein, 30 aa, Homo sapiens
LSWGSLFAAAAAAATAVLGARSPGKKPSHV

SEQ ID NO: 2526 - protein, 106 aa, Homo sapiens
LLTLEPTFRHLLRIMQVSTAALAVLLCTMALCNQFSASLAADTPTACCFSYTSRQIPQNFIADYFETSSQCSKPGVIFLTKRSRQVCADPSEEWVQKYVSDLELSA

SEQ ID NO: 2527 - protein, 1940 aa, Homo sapiens
MVSVVGPMGLLVVLLVGGCAAEEPPRFIKEPKDQIGVSGGVASFVCQATGDPKPRVTWNKKGKKVNSQRFETIEFDESAGAVLRIQPLRTPRDENVYECVAQNSVGEITVHAKLTVLREDQLPSGFPNIDMGPQLKVVERTRTATMLCAASGNPDPEITWFKDFLPVDPSASNGRIKQLRSETFESTPIRGALQIESSEETDQGKYECVATNSAGVRYSSPANLYVRELREVRRVAPRFSILPMSHEIMPGGNVNITCVAVGSPMPYVKWMQGAEDLTPEDDMPVGRNVLELTDVKDSANYTCVAMSSLGVIEAVAQITVKSLPKAPGTPMVTENTATSITITWDSGNPDPVSYYVIEYKSKSQDGPYQIKEDITTTRYSIGGLSPNSEYEIWVSAVNSIGQGPPSESVVTRTGEQAPASAPRNVQARMLSATTMIVQWEEPVEPNGLIRGYRVYYTMEPEHPVGNWQKHNVDDSLLTTVGSLLEDETYTVRVLAFTSVGDGPLSDPIQVKTQQGVPGQPMNLRAEARSETSITLSWSPPRQESIIKYELLFREGDHGREVGRTFDPTTSYVVEDLKPNTEYAFRLAARSPQGLGAFTPVVRQRTLQSKPSAPPQDVKCVSVRSTAILVSWRPPPPETHNGALVGYSVRYRPLGSEDPEPKEVNGIPPTTTQILLEALEKWTQYRITTVAHTEVGPGPESSPVVVRTDEDVPSAPPRKVEAEALNATAIRVLWRSPAPGRQHGQIRGYQVHYVRMEGAEARGPPRIKDVMLADAQWETDDTAEYEMVITNLQPETAYSITVAAYTMKGDGARSKPKVVVTKGAVLGRPTLSVQQTPEGSLLARWEPPAGTAEDQVLGYRLQFGREDSTPLATLEFPPSEDRYTASGVHKGATYVFRLAARSRGGLGEEAAEVLSIPEDTPRGHPQILEAAGNASAGTVLLRWLPPVPAERNGAIVKYTVAVREAGALGPARETELPAAAEPGAENALTLQGLKPDTAYDLQVRAHTRRGPGPFSPPVRYRTFLRDQVSPKNFKVKMIMKTSVLLSWEFPDNYNSPTPYKIQYNGLTLDVDGRTTKKLITHLKPHTFYNFVLTNRGSSLGGLQQTVTAWTAFNLLNGKPSVAPKPDADGFIMVYLPDGQSPVPVQSYFIVMVPLRKSRGGQFLTPLGSPEDMDLEELIQDISRLQRRSLRHSRQLEVPRPYIAARFSVLPPTFHPGDQKQYGGFDNRGLEPGHRYVLFVLAVLQKSEPTFAASPFSDPFQLDNPDPQPIVDGEEGLIWVIGPVLAVVFIICIVIAILLYKNKPDSKRKDSEPRTKCLLNNADLAPHHPKDPVEMRRINFQTPDSGLRSPLREPGFHFESMLSHPPIPIADMAEHTERLKANDSLKLSQEYESIDPGQQFTWEHSNLEVNKPKNRYANVIAYDHSRVILQPIEGIMGSDYINANYVDGYRCQNAYIATQGPLPETFGDFWRMVWEQRSATIVMMTRLEEKSRIKCDQYWPNRGTETYGFIQVTLLDTIELATFCVRTFSLHKNGSSEKREVRQFQFTAWPDHGVPEYPTPFLAFLRRVKTCNPPDAGPIVVHCSAGVGRTGCFIVIDAMLERIKPEKTVDVYGHVTLMRSQRNYMVQTEDQYSFIHEALLEAVGCGNTEVPARSLYAYIQKLAQVEPGEHVTGMELEFKRLANSKAHTSRFISANLPCNKFKNRLVNIMPYESTRVCLQPIRGVEGSDYINASFIDGYRQQKAYIATQGPLAETTEDFWRMLWENNSTIVVMLTKLREMGREKCHQYWPAERSARYQYFVVDPMAEYNMPQYILREFKVTDARDGQSRTVRQFQFTDWPEQGVPKSGEGFIDFIGQVHKTKEQFGQDGPISVHCSAGVGRTGVFITLSIVLERMRYEGVVDIFQTVKMLRTQRPAMVQTEDEYQFCYQAALEYLGSFDHYAT

SEQ ID NO: 2528 - protein, 48 aa, Homo sapiens
MTLATILFLLGILIVISKKVKCRKADSSPTCKSCKSELPSSAPGGGGV

SEQ ID NO: 2529 - protein, 1206 aa, Homo sapiens
MPKKKRLSAGRVPLILFLCQMISALEVPLDPKLLEDLVQPPTITQQSPKDYIIDPRENIVIQCEAKGKPPPSFSWTRNGTHFDIDKDPLVTMKPGTGTLIINIMSEGKAETYEGVYQCTARNERGAAVSNNIVVRPSRSPLWTKEKLEPITLQSGQSLVLPCRPPIGLPPPIIFWMDNSFQRLPQSERVSQGLNGDLYFSNVLPEDTREDYICYARFNHTQTIQQKQPISVKVISVDELNDTIAANLSDTEFYGAKSSRERPPTFLTPEGNASNKEELRGNVLSLECIAEGLPTPIIYWAKEDGMLPKNRTVYKNFEKTLQIIHVSEADSGNYQCIAKNALGAIHHTISVRVKAAPYWITAPQNLVLSPGEDGTLICRANGNPKPRISWLTNGVPIEIAPDDPSRKIDGDTIIFSNVQERSSAVYQCNASNEYGYLLANAFVNVLAEPPRILTPANTLYQVIANRPALLDCAFFGSPLPTIEWFKGAKGSALHEDIYVLHENGTLEIPVAQKDSTGTYTCVARNKLGMAKNEVHLEIKDPTWIVKQPEYAVVQRGSMVSFECKVKHDHTLSLTVLWLKDNRELPSDERFTVDKDHLVVADVSDDDSGTYTCVANTTLDSVSASAVLSVVAPTPTPAPVYDVPNPPFDLELTDQLDKSVQLSWTPGDDNNSPITKFIIEYEDAMHKPGLWHHQTEVSGTQTTAQLKLSPYVNYSFRVMAVNSIGKSLPSEASEQYLTKASEPDKNPTAVEGLGSEPDNLVITWKPLNGFESNGPGLQYKVSWRQKDGDDEWTSVVVANVSKYIVSGTPTFVPYLIKVQALNDMGFAPEPAVVMGHSGEDLPMVAPGNVRVNVVNSTLAEVHWDPVPLKSIRGHLQGYRIYYWKTQSSSKRNRRHIEKKILTFQGSKTHGMLPGLEPFSHYTLNVRVVNGKGEGPASPDRVFNTPEGVPSAPSSLKIVNPTLDSLTLEWDPPSHPNGILTEYTLKYQPINSTHELGPLVDLKIPANKTRWTLKNLNFSTRYKFYFYAQTSAGSGSQITEEAVTTVDEAGILPPDVGAGKAMASRQVDIATQGWFIGLMCAVALLILILLIVCFIRRNKGGKYPVKEKEDAHADPEIQPMKEDDGTFGEYSDAEDHKPLKKGSRTPSDRTVKKEDSDDSLVDYGEGVNGQFNEDGSFIGQYSGKKEKEPAEGNESSEAPSPVNAMNSFV

SEQ ID NO: 2530 - protein, 25 aa, Homo sapiens
IFGSAIGLFGVIVAILQTSRVKMGD

SEQ ID NO: 2531 - protein, 18 aa, Homo sapiens
LFIASVFMLHIWGKYTRS

SEQ ID NO: 2532 - protein, 1486 aa, Homo sapiens
MGLLVVLLVGGCAAEEPPRFIKEPKDQIGVSGGVASFVCQATGDPKPRVTWNKKGKKVNSQRFETIEFDESAGAVLRIQPLRTPRDENVYECVAQNSVGEITVHAKLTVLREDQLPSGFPNIDMGPQLKVVERTRTATMLCAASGNPDPEITWFKDFLPVDPSASNGRIKQLRSGALQIESSEETDQGKYECVATNSAGVRYSSPANLYVRVRRVAPRFSILPMSHEIMPGGNVNITCVAVGSPMPYVKWMQGAEDLTPEDDMPVGRNVLELTDVKDSANYTCVAMSSLGVIEAVAQITVKSLPKAPGTPMVTENTATSITITWDSGNPDPVSYYVIEYKSKSQDGPYQIKEDITTTRYSIGGLSPNSEYEIWVSAVNSIGQGPPSESVVTRTGEQAPASAPRNVQARMLSATTMIVQWEEPVEPNGLIRGYRVYYTMEPEHPVGNWQKHNVDDSLLTTVGSLLEDETYTVRVLAFTSVGDGPLSDPIQVKTQQGVPGQPMNLRAEARSETSITLSWSPPRQESIIKYELLFREGDHGREVGRTFDPTTSYVVEDLKPNTEYAFRLAARSPQGLGAFTPVVRQRTLQSISPKNFKVKMIMKTSVLLSWEFPDNYNSPTPYKIQYNGLTLDVDGRTTKKLITHLKPHTFYNFVLTNRGSSLGGLQQTVTAWTAFNLLNGKPSVAPKPDADGFIMVYLPDGQSPVPVQSYFIVMVPLRKSRGGQFLTPLGSPEDMDLEELIQDISRLQRRSLRHSRQLEVPRPYIAARFSVLPPTFHPGDQKQYGGFDNRGLEPGHRYVLFVLAVLQKSEPTFAASPFSDPFQLDNPDPQPIVDGEEGLIWVIGPVLAVVFIICIVIAILLYKKKPHSKRKDSEPRTKCLLNNADLAPHHPKDPVEMRRINFQTPGMLSHPPIPIADMAEHTERLKANDSLKLSQEYESIDPGQQFTWEHSNLEVNKPKNRYANVIAYDHSRVILQPIEGIMGSDYINANYVDGYRCQNAYIATQGPLPETFGDFWRMVWEQRSATIVMMTRLEEKSRIKCDQYWPNRGTETYGFIQVTLLDTIELATFCVRTFSLHKNGSSEKREVRQFQFTAWPDHGVPEYPTPFLAFLRRVKTCNPPDAGPIVVHCSAGVGRTGCFIVIDAMLERIKPEKTVDVYGHVTLMRSQRNYMVQTEDQYSFIHEALLEAVGCGNTEVPARSLYAYIQKLAQVEPGEHVTGMELEFKRLANSKAHTSRFISANLPCNKFKNRLVNIMPYESTRVCLQPIRGVEGSDYINASFIDGYRQQKAYIATQGPLAETTEDFWRMLWENNSTIVVMLTKLREMGREKCHQYWPAERSARYQYFVVDPMAEYNMPQYILREFKVTDARDGQSRTVRQFQFTDWPEQGVPKSGEGFIDFIGQVHKTKEQFGQDGPISVHCSAGVGRTGVFITLSIVLERMRYEGVVDIFQTVKMLRTQRPAMVQTEDEYQFCYQAALEYLGSFDHYAT

SEQ ID NO: 2533 - protein, 1895 aa, Homo sapiens
MGLLVVLLVGGCAAEEPPRFIKEPKDQIGVSGGVASFVCQATGDPKPRVTWNKKGKKVNSQRFETIEFDESAGAVLRIQPLRTPRDENVYECVAQNSVGEITVHAKLTVLREDQLPSGFPNIDMGPQLKVVERTRTATMLCAASGNPDPEITWFKDFLPVDPSASNGRIKQLRSGALQIESSEETDQGKYECVATNSAGVRYSSPANLYVRVRRVAPRFSILPMSHEIMPGGNVNITCVAVGSPMPYVKWMQGAEDLTPEDDMPVGRNVLELTDVKDSANYTCVAMSSLGVIEAVAQITVKSLPKAPGTPMVTENTATSITITWDSGNPDPVSYYVIEYKSKSQDGPYQIKEDITTTRYSIGGLSPNSEYEIWVSAVNSIGQGPPSESVVTRTGEQAPASAPRNVQARMLSATTMIVQWEEPVEPNGLIRGYRVYYTMEPEHPVGNWQKHNVDDSLLTTVGSLLEDETYTVRVLAFTSVGDGPLSDPIQVKTQQGVPGQPMNLRAEARSETSITLSWSPPRQESIIKYELLFREGDHGREVGRTFDPTTSYVVEDLKPNTEYAFRLAARSPQGLGAFTPVVRQRTLQSKPSAPPQDVKCVSVRSTAILVSWRPPPPETHNGALVGYSVRYRPLGSEDPEPKEVNGIPPTTTQILLEALEKWTQYRITTVAHTEVGPGPESSPVVVRTDEDVPSAPPRKVEAEALNATAIRVLWRSPAPGRQHGQIRGYQVHYVRMEGAEARGPPRIKDVMLADAQEMVITNLQPETAYSITVAAYTMKGDGARSKPKVVVTKGAVLGRPTLSVQQTPEGSLLARWEPPAGTAEDQVLGYRLQFGREDSTPLATLEFPPSEDRYTASGVHKGATYVFRLAARSRGGLGEEAAEVLSIPEDTPRGHPQILEAAGNASAGTVLLRWLPPVPAERNGAIVKYTVAVREAGALGPARETELPAAAEPGAENALTLQGLKPDTAYDLQVRAHTRRGPGPFSPPVRYRTFLRDQVSPKNFKVKMIMKTSVLLSWEFPDNYNSPTPYKIQYNGLTLDVDGRTTKKLITHLKPHTFYNFVLTNRGSSLGGLQQTVTAWTAFNLLNGKPSVAPKPDADGFIMVYLPDGQSPVPVQSYFIVMVPLRKSRGGQFLTPLGSPEDMDLEELIQDISRLQRRSLRHSRQLEVPRPYIAARFSVLPPTFHPGDQKQYGGFDNRGLEPGHRYVLFVLAVLQKSEPTFAASPFSDPFQLDNPDPQPIVDGEEGLIWVIGPVLAVVFIICIVIAILLYKNKPDSKRKDSEPRTKCLLNNADLAPHHPKDPVEMRRINFQTPGMLSHPPIPIADMAEHTERLKANDSLKLSQEYESIDPGQQFTWEHSNLEVNKPKNRYANVIAYDHSRVILQPIEGIMGSDYINANYVDGYRCQNAYIATQGPLPETFGDFWRMVWEQRSATIVMMTRLEEKSRIKCDQYWPNRGTETYGFIQVTLLDTIELATFCVRTFSLHKNGSSEKREVRQFQFTAWPDHGVPEYPTPFLAFLRRVKTCNPPDAGPIVVHCSAGVGRTGCFIVIDAMLERIKPEKTVDVYGHVTLMRSQRNYMVQTEDQYSFIHEALLEAVGCGNTEVPARSLYAYIQKLAQVEPGEHVTGMELEFKRLANSKAHTSRFISANLPCNKFKNRLVNIMPYESTRVCLQPIRGVEGSDYINASFIDGYRQQKAYIATQGPLAETTEDFWRMLWENNSTIVVMLTKLREMGREKCHQYWPAERSARYQYFVVDPMAEYNMPQYILREFKVTDARDGQSRTVRQFQFTDWPEQGVPKSGEGFIDFIGQVHKTKEQFGQDGPISVHCSAGVGRTGVFITLSIVLERMRYEGVVDIFQTVKMLRTQRPAMVQTEDEYQFCYQAALEYLGSFDHYAT

SEQ ID NO: 2534 - protein, 131 aa, Homo sapiens [sequence omitted]

SEQ ID NO: 2535 - protein, 259 aa, Homo sapiens
IAAPDSRRWLWSVLAAALGLLTAGVSALEVYTPKEIFVANGTQGKLTCKFKSTSTTGGLTSVSWSFQPEGADTTVSFFHYSQGQVYLGNYPPFKDRISWAGDLDKKDASINIENMQFIHNGTYICDVKNPPDIVVQPGHIRLYVVEKENLPVFPVWVVVGIVTAVVLGLTLLISMILAVLYRRKNSKRDYTGCSTSESLSPVKQAPRKSPSDTEGLVKSLPSGSHQGPVIYAQLDHSGGHHSDKINKSESVVYADIRKN

SEQ ID NO: 2536 - protein, 1901 aa, Homo sapiens
TPPRCPVPLLLLLLLGAARAGALEIQRRFPSPTPTNNFALDGAAGTVYLAAVNRLYQLSGANLSLEAEAAVGPVPDSPLCHAPQLPQASCEHPRRLTDNYNKILQLDPGQGLVVVCGSIYQGFCQLRRRGNISAVAVRFPPAAPPAEPVTVFPSMLNVAANHPNASTVGLVLPPAAGAGGSRLLVGATYTGYGSSFFPRNRSLEDHRFENTPEIAIRSLDTRGDLAKLFTFDLNPSDDNILKIKQGAKEQHKLGFVSAFLHPSDPPPGAQSYAYLALNSEARAGDKESQARSLLARICLPHGAGGDAKKLTESYIQLGLQCAGGAGRGDLYSRLVSVFPARERLFAVFERPQGSPAARAAPAALCAFRFADVRAAIRAARTACFVEPAPDVVAVLDSVVQGTGPACERKLNIQLQPEQLDCGAAHLQHPLSILQPLKATPVFRAPGLTSVAVASVNNYTAVFLGTVNGRLLKINLNESMQVVSRRVVTVAYGEPVHHVMQFDPADSGYLYLMTSHQMARVKVAACNVHSTCGDCVGAADAYCGWCALETRCTLQQDCTNSSQQHFWTSASEGPSRCPAMTVLPSEIDVRQEYPGMILQISGSLPSLSGMEMACDYGNNIRTVARVPGPAFGHQIAYCNLLPRDQFPPFPPNQDHVTVEMSVRVNGRNIVKANFTIYDCSRTAQVYPHTACTSCLSAQWPCFWCSQQHSCVSNQSRCEASPNPTSPQDCPRTLLSPLAPVPTGGSQNILVPLANTAFFQGAALECSFGLEEIFEAVWVNESVVRCDQVVLHTTRKSQVFPLSLQLKGRPARFLDSPEPMTVMVYNCAMGSPDCSQCLGREDLGHLCMWSDGCRLRGPLQPMAGTCPAPEIHAIEPLSGPLDGGTLLTIRGRNLGRRLSDVAHGVWIGGVACEPLPDRYTVSEEIVCVTGPAPGPLSGVVTVNASKEGKSRDRFSYVLPLVHSLEPTMGPKAGGTRITIHGNDLHVGSELQVLVNDTDPCTELMRTDTSIACTMPEGALPAPVPVCVRFERRGCVHGNLTFWYMQNPVITAISPRRSPVSGGRTITVAGERFHMVQNVSMAVHHIGREPTLCKVLNSTLITCPSPGALSNASAPVDFFINGRAYADEVAVAEELLDPEEAQRGSRFRLDYLPNPQFSTAKREKWIKHHPGEPLTLVIHKEQDSLGLQSHEYRVKIGQVSCDIQIVSDRIIHCSVNESLGAAVGQLPITIQVGNFNQTIATLQLGGSETAIIVSIVICSVLLLLSVVALFVFCTKSRRAERYWQKTLLQMEEMESQIREEIRKGFAELQTDMTDLTKELNRSQGIPFLEYKHFVTRTFFPKCSSLYEERYVLPSQTLNSQGSSQAQETHPLLGEWKIPESCRPNMEEGISLFSSLLNNKHFLIVFVHALEQQKDFAVRDRCSLASLLTIALHGKLEYYTSIMKELLVDLIDASAAKNPKLMLRRTESVVEKMLTNWMSICMYSCLRETVGEPFFLLLCAIKQQINKGSIDAITGKARYTLSEEWLLRENIEAKPRNLNVSFQGCGMDSLSVRAMDTDTLTQVKEKILEAFCKNVPYSQWPRAEDVDLEWFASSTQSYILRDLDDTSVVEDGRKKLNTLAHYKIPEGASLAMSLIDKKDNTLGRVKDLDTEKYFHLVLPTDELAEPKKSHRQSHRKKVLPEIYLTRLLSTKGTLQKFLDDLFKAILSIREDKPPLAVKYFFDFLEEQAEKRGISDPDTLHIWKTNSLPLRFWVNILKNPQFVFDIDKTDHIDACLSVIAQAFIDACSISDLQLGKDSPTNKLLYAKEIPEYRKIVQRYYKQIQDMTPLSEQEMNAHLAEESRKYQNEFNTNVAMAEIYKYAKRYRPQIMAALEANPTARRTQLQHKFEQVVALMEDNIYECYSEA

SEQ ID NO: 2537 - protein, 158 aa, Homo sapiens
KNHLLFWGVLAVFIKAVHVKAQEDERIVLVDNKCKCARITSRIIRSSEDPNEDIVERNIRIIVPLNNRENISDPTSPLRTRFVYHLSDLCKKCDPTEVELDNQIVTATQSNICDEDSATETCYTYDRNKCYTAVVPLVYGGETKMVETALTPDACYPD

SEQ ID NO: 2538 - protein, 113 aa, Homo sapiens
LALTHSPLACLCSPSMALLLALSLLVLWTSPAPTLSGTNDAEDCCLSVTQKPIPGYIVRNFHYLLIKDGCRVPAVVFTTLRGRQLCAPPDQPWVERIIQRLQRTSAKMKRRSS

SEQ ID NO: 2539 - protein, 2236 aa, Homo sapiens
LLEVAWPLFIFLILISVRLSYPPYEQHECHFPNKAMPSAGTLPWVQGIICNANNPCFRYPTPGEAPGVVGNFNKSIVARLFSDARRLLLYSQKDTSMKDMRKVLRTLQQIKKSSSNLKLQDFLVDNETFSGFLYHNLSLPKSTVDKMLRADVILHKVFLQGYQLHLTSLCNGSKSEEMIQLGDQEVSELCGLPREKLAAAERVLRSNMDILKPILRTLNSTSPFPSKELAEATKTLLHSLGTLAQELFSMRSWSDMRQEVMFLTNVNSSSSSTQIYQAVSRIVCGHPEGGGLKIKSLNWYEDNNYKALFGGNGTEEDAETFYDNSTTPYCNDLMKNLESSPLSRIIWKALKPLLVGKILYTPDTPATRQVMAEVNKTFQELAVFHDLEGMWEELSPKIWTFMENSQEMDLVRMLLDSRDNDHFWEQQLDGLDWTAQDIVAFLAKHPEDVQSSNGSVYTWREAFNETNQAIRTISRFMECVNLNKLEPIATEVWLINKSMELLDERKFWAGIVFTGITPGSIELPHHVKYKIRMDIDNVERTNKIKDGYWDPGPRADPFEDMRYVWGGFAYLQDVVEQAIIRVLTGTEKKTGVYMQQMPYPCYVDDIFLRVMSRSMPLFMTLAWIYSVAVIIKGIVYEKEARLKETMRIMGLDNSILWFSWFISSLIPLLVSAGLLVVILKLGNLLPYSDPSVVFVFLSVFAVVTILQCFLISTLFSRANLAAACGGIIYFTLYLPYVLCVAWQDYVGFTLKIFASLLSPVAFGFGCEYFALFEEQGIGVQWDNLFESPVEEDGFNLTTSVSMMLFDTFLYGVMTWYIEAVFPGQYGIPRPWYFPCTKSYWFGEESDEKSHPGSNQKRISEICMEEEPTHLKLGVSIQNLVKVYRDGMKVAVDGLALNFYEGQITSFLGHNGAGKTTTMSILTGLFPPTSGTAYILGKDIRSEMSTIRQNLGVCPQHNVLFDMLTVEEHIWFYARLKGLSEKHVKAEMEQMALDVGLPSSKLKSKTSQLSGGMQRKLSVALAFVGGSKVVILDEPTAGVDPYSRRGIWELLLKYRQGRTIILSTHHMDEADVLGDRIAIISHGKLCCVGSSLFLKNQLGTGYYLTLVKKDVESSLSSCRNSSSTVSYLKKEDSVSQSSSDAGLGSDHESDTLTIDVSAISNLIRKHVSEARLVEDIGHELTYVLPYEAAKEGAFVELFHEIDDRLSDLGISSYGISETTLEEIFLKVAEESGVDAETSDGTLPARRNRRAFGDKQSCLRPFTEDDAADPNDSDIDPESRETDLLSGMDGKGSYQVKGWKLTQQQFVALLWKRLLIARRSRKGFFAQIVLPAVFVCIALVFSLIVPPFGKYPSLELQPWMYNEQYTFVSNDAPEDTGTLELLNALTKDPGFGTRCMEGNPIPDTPCQAGEEEWTTAPVPQTIMDLFQNGNWTMQNPSPACQCSSDKIKKMLPVCPPGAGGLPPPQRKQNTADILQDLTGRNISDYLVKTYVQIIAKSLKNKIWVNEFRYGGFSLGVSNTQALPPSQEVNDAIKQMKKHLKLAKDSSADRFLNSLGRFMTGLDTKNNVKVWFNNKGWHAISSFLNVINNAILRANLQKGENPSHYGITAFNHPLNLTKQQLSEVALMTTSVDVLVSICVIFAMSFVPASFVVFLIQERVSKAKHLQFISGVKPVIYWLSNFVWDMCNYVVPATLVIIIFICFQQKSYVSSTNLPVLALLLLLYGWSITPLMYPASFVFKIPSTAYVVLTSVNLFIGINGSVATFVLELFTDNKLNNINDILKSVFLIFPHFCLGRGLIDMVKNQAMADALERFGENRFVSPLSWDLVGRNLFAMAVEGVVFFLITVLIQYRFFIRPRPVNAKLSPLNDEDEDVRRERQRILDGGGQNDILEIKELTKIYRRKRKPAVDRICVGIPPGECFGLLGVNGAGKSSTFKMLTGDTTVTRGDAFLNKNSILSNIHEVHQNMGYCPQFDAITELLTGREHVEFFALLRGVPEKEVGKVGEWAIRKLGLVKYGEKYAGNYSGGNKRKLSTAMALIGGPPVVFLDEPTTGMDPKARRFLWNCALSVVKEGRSVVLTSHSMEECEALCTRMAIMVNGRFRCLGSVQHLKNRFGDGYTIVVRIAGSNPDLKPVQDFFGLAFPGSVLKEKHRNMLQYQLPSSLSSLARIFSILSQSKKRLHIEDYSVSQTTLDQVFVNFAKDQSDDDHLKDLSLHKNQTVVDVAVLTSFLQDEKVKESYV

SEQ ID NO: 2540 - protein, 287 aa, Homo sapiens
LPFLLCAVLLSAVQAQAGWLQHDFGHLSVFSTSKWNHLLHHFVIGHLKGAPASWWNHMHFQHHAKPNCFRKDPDINMHPFFFALGKILSVELGKQKKKYMPYNHQHKYFFLIGPPALLPLYFQWYIFYFVIQRKKWVDLAWMITFYVRFFLTYVPLLGLKAFLGLFFIVRFLESNWFVWVTQMNHIPMHIDHDRNMDWVSTQLQATCNVHKSAFNDWFSGHLNFQIEHHLFPTMPRHNYHKVAPLVQSLCAKHGIEYQSKPLLSAFADIIHSLKESGQLWLDAYLHQ

SEQ ID NO: 2541 - protein, 85 aa, Homo sapiens
KMKGWGWLALLLGALLGTAWARRSQDLHCGACRALVDELEWEIAQVDPKKTIQMGSFRINPDGSQSVVEVTVTVPPNKVAHSGFG

SEQ ID NO: 2542 - protein, 183 aa, Homo sapiens
KMKGWGWLALLLGALLGTAWARRSQDLHCGACRALVDELEWEIAQVDPKKTIQMGSFRINPDGSQSVVEVPYARSEAHLTELLEEICDRMKEYGEQIDPSTHRKNYVRVVGRNGESSELDLQGIRIDSDISGTLKFACESIVEEYEDELIEFFSREADNVKDKLCSKRTDLCDHALHISHDEL

SEQ ID NO: 2543 - protein, 91 aa, Homo sapiens
KLCVTVLSLLVLVAAFCSLALSAPMGSDPPTACCFSYTARKLPRNFVVDYYETSSLCSQPAVVFQTKRGKQVCADPSESWVQEYVYDLELN

SEQ ID NO: 2544 - protein, 105 aa, Homo sapiens
LTLEPTFRHLLRIMQVSTAALAVLLCTMALCNQFSASLAADTPTACCFSYTSRQIPQNFIADYFETSSQCSKPGVIFLTKRSRQVCADPSEEWVQKYVSDLELSA

SEQ ID NO: 2545 - protein, 213 aa, Homo sapiens
LRLALGLLLLATLLRPADACSCSPVHPQQAFCNADVVIRAKAVSEKEVDSGNDIYGNPIKRIQYEIKQIKMFKGPEKDIEFIYTAPSSAVCGVSLDVGGKKEYLIAGKAEGDGKMHITLCDFIVPWDTLSTTQKKSLNHRYQMGCECKITRCPMIPCYISSPDECLWMDWVTEKNINGHQAKFFACIKRSDGSCAWYRGAAPPKQEFLDIEDP

SEQ ID NO: 2546 - protein, 277 aa, Homo sapiens
LAVITTLPSVVRLLVTAGASPMALDRHGQTAAHLACEHRSPTCLRALLDSAAPGTLDLEARNYDGLTALHVAVNTECQETVQLLLERGADIDAVDIKSGRSPLIHAVENNSLSMVQLLLQHGANVNAQMYSGSSALHSASGRGLLPLVRTLVRSGADSSLKNCHNDTPLMVARSRRVIDILRGKATRPASTSQPDPSPDRSANTSPESSSRLSSNGLLSASPSSSPSQSPPRDPPGFPMAPPNFFLPSPSPPAFLPFAGVLRGPGRPVPPSPAPGGS

SEQ ID NO: 2547 - protein, 12 aa, Homo sapiens
IIYNATLLFLVS

SEQ ID NO: 2548 - protein, 684 aa, Homo sapiens
IHPAPASGDPMARAHWGCCPWLVLLCACAWGHTKPVDLGGQDVRNCSTNPPYLPVTVVNTTMSLTALRQQMQTQNLSAYIIPGTDAHMNEYIGQHDERRAWITGFTGSAGTAVVTMKKAAVWTDSRYWTQAERQMDCNWELHKEVGTTPIVTWLLTEIPAGGRVGFDPFLLSIDTWESYDLALQGSNRQLVSITTNLVDLVWGSERPPVPNQPIYALQEAFTGSTWQEKVSGVRSQMQKHQKVPTAVLLSALEETAWLFNLRASDIPYNPFFYSYTLLTDSSIRLFANKSRFSSETLSYLNSSCTGPMCVQIEDYSQVRDSIQAYSLGDVRIWIGTSYTMYGIYEMIPKEKLVTDTYSPVMMTKAVKNSKEQALLKASHVRDAVAVIRYLVWLEKNVPKGTVDEFSGAEIVDKFRGEEQFSSGPSFETISASGLNAALAHYSPTKELNRKLSSDEMYLLDSGGQYWDGTTDITRTVHWGTPSAFQKEAYTRVLIGNIDLSRLIFPAATSGRMVEAFARRALWDAGLNYGHGTGHGIGNFLCVHEWPVGFQSNNIAMAKGMFTSIEPGYYKDGEFGIRLEDVALVVEAKTKYPGSYLTFEVVSFVPYDRNLIDVSLLSPEHLQYLNRYYQTIREKVGPELQRRQLLEEFEWLQQHTEPLAARAPDTASWASVLVVSTLAILGWSV

SEQ ID NO: 2549 - protein, 349 aa, Homo sapiens
MGLAGAAGRWWGLALGLTAFFLPGVHSQVVQVNDSMYGFIGTDVVLHCSFANPLPSVKITQVTWQKSTNGSKQNVAIYNPSMGVSVLAPYRERVEFLRPSFTDGTIRLSRLELEDEGVYICEFATFPTGNRESQLNLTVMAKPTNWIEGTQAVLRAKKGQDDKVLVATCTSANGKPPSVVSWETRLKGEAEYQEIRNPNGTVTVISRYRLVPSREAHQQSLACIVNYHMDRFKESLTLNVQYEPEVTIEGFDGNWYLQRMDVKLTCKADANPPATEYHWTTLNGSLPKGVEAQNRTLFFKGPINYSLAGTYICEATNPIGTRSGQVEVNITAFCQLIYPGKGRTRARMF

SEQ ID NO: 2550 - protein, 434 aa, Homo sapiens
MPGVTIYELLFLFLWKWKGPLHPPLPPPHQPQPQQPQQQPPPQHQPPHQPPHQPPPQHQPPPQHPPQHPPQHQHHHHHHHLSVPPPPLMPMSQPQFRPHVQTAQPQASSSRMQCPQRQGLRHNTTSQNVSKRPMQQMQPTAPRNSNLRELPIAPSHVIEMSSSRCSATPSAQVKPIVSASPPSRAVAGSRSSQGKTEVKVKPASPVAQPKEEAKTETEFPDEDEETRLYRLKIEEQKRLREEILKQKELRRQQQAGARKKELLERLAQQQQQLYAPPPPAEQEEQALSPSPTNGNPLLPFPGAQVRQNVKNRLLVKNQDVSISNVQPKTSNFVPSSANMQYQGQQMKALKHLRQTRTVPQSQTQPLHKVLPIKPADVEEPAVPQTPRVASIQGRPQDTKPGVKRTVTHRTNSGGGDGPHISSKVRVIKLSGGVS

SEQ ID NO: 2551 - protein, 732 aa, Homo sapiens
ILGASNILWIMFAASQAFKIETTPESRYLAQIGDSVSLTCSTTGCESPFFSWRTQIDSPLNGKVTNEGTTSTLTMNPVSFGNEHSYLCTATCESRKLEKGIQVEIYSFPKDPEIHLSGPLEAGKPITVKCSVADVYPFDRLEIDLLKGDHLMKSQEFLEDADRKSLETKSLEVTFTPVIEDIGKVLVCRAKLHIDEMDSVPTVRQAVKELQVYISPKNTVISVNPSTKLQEGGSVTMTCSSEGLPAPEIFWSKKLDNGNLQHLSGNATLTLIAMRMEDSGIYVCEGVNLIGKNRKEVELIVQEKPFTVEISPGPRIAAQIGDSVMLTCSVMGCESPSFSWRTQIDSPLSGKVRSEGTNSTLTLSPVSFENEHSYLCTVTCGHKKLEKGIQVELYSFPRDPEIEMSGGLVNGSSVTVSCKVPSVYPLDRLEIELLKGETILENIEFLEDTDMKSLENKSLEMTFIPTIEDTGKALVCQAKLHIDDMEFEPKQRQSTQTLYVNVAPRDTTVLVSPSSILEEGSSVNMTCLSQGFPAPKILWSRQLPNGELQPLSENATLTLISTKMEDSGVYLCEGINQAGRSRKEVELIIQVTPKDIKLTAFPSESVKEGDTVIISCTCGNVPETWIILKKKAETGDTVLKSIDGAYTIRKAQLKDAGVYECESKNKVGSQLRSLTLDVQGRENNKDYFSPELLVLYFASSLIIPAIGMIIYFARKANMKGSYSLVEAQKSKV

SEQ ID NO: 2552 - protein, 483 aa, Homo sapiens
LSASAGPWSGSRGGSMLAVGCALLAALLAAPGAALAPRRCPAQEVARGVLTSLPGDSVTLTCPGVEPEDNATVHWVLRKPAAGSHPSRWAGMGRRLLLRSVQLHDSGNYSCYRAGRPAGTVHLLVDVPPEEPQLSCFRKSPLSNVVCEWGPRSTPSLTTKAVLLVRKFQNSPAEDFQEPCQYSQESQKFSCQLAVPEGDSSFYIVSMCVASSVGSKFSKTQTFQGCGILQPDPPANITVTAVARNPRWLSVTWQDPHSWNSSFYRLRFELRYRAERSKTFTTWMVKDLQHHCVIHDAWSGLRHVVQLRAQEEFGQGEWSEWSPEAMGTPWTESRSPPAENEVSTPMQALTTNKDDDNILFRDSANATSLPVQDSSSVPLPTFLVAGGSLAFGTLLCIAIVLRFKKTWKLRALKEGKTSMHPPYSLGQLVPERPRPTPVLVPLISPPVSPSSLGSDNTSSHNRPDARDPRSPYDISNTDYFFPR

SEQ ID NO: 2553 - protein, 260 aa, Homo sapiens
VIAAPDSRRWLWSVLAAALGLLTAGVSALEVYTPKEIFVANGTQGKLTCKFKSTSTTGGLTSVSWSFQPEGADTTVSFFHYSQGQVYLGNYPPFKDRISWAGDLDKKDASINIENMQFIHNGTYICDVKNPPDIVVQPGHIRLYVVEKENLPVFPVWVVVGIVTAVVLGLTLLISMILAVLYRRKNSKRDYTGCSTSESLSPVKQAPRKSPSDTEGLVKSLPSGSHQGPVIYAQLDHSGGHHSDKINKSESVVYADIRKN

SEQ ID NO: 2554 - protein, 567 aa, Homo sapiens
VLLRLICFIALLISSLEADKCKEREEKIILVSSANEIDVRPCPLNPNEHKGTITWYKDDSKTPVSTEQASRIHQHKEKLWFVPAKVEDSGHYYCVVRNSSYCLRIKISAKFVENEPNLCYNAQAIFKQKLPVAGDGGLVCPYMEFFKNENNELPKLQWYKDCKPLLLDNIHFSGVKDRLIVMNVAEKHRGNYTCHASYTYLGKQYPITRVIEFITLEENKPTRPVIVSPANETMEVDLGSQIQLICNVTGQLSDIAYWKWNGSVIDEDDPVLGEDYYSVENPANKRRSTLITVLNISEIESRFYKHPFTCFAKNTHGIDAAYIQLIYPVTNFQKHMIGICVTLTVIIVCSVFIYKIFKIDIVLWYRDSCYDFLPIKASDGKTYDAYILYPKTVGEGSTSDCDIFVFKVLPEVLEKQCGYKLFIYGRDDYVGEDIVEVINENVKKSRRLIIILVRETSGFSWLGGSSEEQIAMYNALVQDGIKVVLLELEKIQDYEKMPESIKFIKQKHGAIRWSGDFTQGPQSAKTRFWKNVRYHMPVQRRSPSSKHQLLSPATKEKLQREAHVPLG

SEQ ID NO: 2555 - protein, 18 aa, Homo sapiens
LSCLFVVLKGRSFVLWVC

SEQ ID NO: 2556 - protein, 114 aa, Homo sapiens
IFAAIFVGVLVMSGRGKGGKGLGKGGAKRHRKVLRDNIQGITKPAIRRLARRGGVKRISGLIYEETRGVLKVFLENVIRDAVTYTEHAKRKTVTAMDVVYALKRQGRTLYGFGG

SEQ ID NO: 2557 - protein, 20 aa, Homo sapiens
LGWWGGLVWVQVGLIELVLC

SEQ ID NO: 2558 - protein, 904 aa, Homo sapiens
IISLFTFAVGVNICLGFTAHRIKRAEGWEEGPPTVLSDSPWTNISGSCKGRCFELQEAGPPDCRCDNLCKSYTSCCHDFDELCLKTARGWECTKDRCGEVRNEENACHCSEDCLARGDCCTNYQVVCKGESHWVDDDCEEIKAAECPAGFVRPPLIIFSVDGFRASYMKKGSKVMPNIEKLRSCGTHSPYMRPVYPTKTFPNLYTLATGLYPESHGIVGNSMYDPVFDATFHLRGREKFNHRWWGGQPLWITATKQGVKAGTFFWSVVIPHERRILTILQWLTLPDHERPSVYAFYSEQPDFSGHKYGPFGPEESSYGSPFTPAKRPKRKVAPKRRQERPVAPPKKRRRKIHRMDHYAAETRQDKMTNPLREIDKIVGQLMDGLKQLKLHRCVNVIFVGDHGMEDVTCDRTEFLSNYLTNVDDITLVPGTLGRIRSKFSNNAKYDPKAIIANLTCKKPDQHFKPYLKQHLPKRLHYANNRRIEDIHLLVERRWHVARKPLDVYKKPSGKCFFQGDHGFDNKVNSMQTVFVGYGSTFKYKTKVPPFENIELYNVMCDLLGLKPAPNNGTHGSLNHLLRTNTFRPTMPEEVTRPNYPGIMYLQSDFDLGCTCDDKVEPKNKLDELNKRLHTKGSTEERHLLYGRPAVLYRTRYDILYHTDFESGYSEIFLMPLWTSYTVSKQAEVSSVPDHLTSCVRPDVRVSPSFSQNCLAYKNDKQMSYGFLFPPYLSSSPEAKYDAFLVTNMVPMYPAFKRVWNYFQRVLVKKYASERNGVNVISGPIFDYDYDGLHDTEDKIKQYVEGSSIPVPTHYYSIITSCLDFTQPADKCDGPLSVSSFILPHRPDNEESCNSSEDESKWVEELMKMHTARVRDIEHLTSLDFFRKTSRSYPEILTLKTYLHTYESEI

SEQ ID NO: 2559 - protein, 877 aa, Homo sapiens
IISLFTFAVGVNICLGFTAHRIKRAEGWEEGPPTVLSDSPWTNISGSCKGRCFELQEAGPPDCRCDNLCKSYTSCCHDFDELCLKTARGWECTKDRCGEVRNEENACHCSEDCLARGDCCTNYQVVCKGESHWVDDDCEEIKAAECPAGFVRPPLIIFSVDGFRASYMKKGSKVMPNIEKLRSCGTHSPYMRPVYPTKTFPNLYTLATGLYPESHGIVGNSMYDPVFDATFHLRGREKFNHRWWGGQPLWITATKQGVKAGTFFWSVVIPHERRILTILQWLTLPDHERPSVYAFYSEQPDFSGHKYGPFGPEMTNPLREIDKIVGQLMDGLKQLKLHRCVNVIFVGDHGMEDVTCDRTEFLSNYLTNVDDITLVPGTLGRIRSKFSNNAKYDPKAIIANLTCKKPDQHFKPYLKQHLPKRLHYANNRRIEDIHLLVERRWHVARKPLDVYKKPSGKCFFQGDHGFDNKVNSMQTVFVGYGSTFKYKTKVPPFENIELYNVMCDLLGLKPAPNNGTHGSLNHLLRTNTFRPTMPEEVTRPNYPGIMYLQSDFDLGCTCDDKVEPKNKLDELNKRLHTKGSTEAETRKFRGSRNENKENINGNFEPRKERHLLYGRPAVLYRTRYDILYHTDFESGYSEIFLMPLWTSYTVSKQAEVSSVPDHLTSCVRPDVRVSPSFSQNCLAYKNDKQMSYGFLFPPYLSSSPEAKYDAFLVTNMVPMYPAFKRVWNYFQRVLVKKYASERNGVNVISGPIFDYDYDGLHDTEDKIKQYVEGSSIPVPTHYYSIITSCLDFTQPADKCDGPLSVSSFILPHRPDNEESCNSSEDESKWVEELMKMHTARVRDIEHLTSLDFFRKTSRSYPEILTLKTYLHTYESEI

SEQ ID NO: 2560 - protein, 287 aa, Homo sapiens
KLREESAARVVLTSLLACLPAGPRVYFLKGGYETFYSEYPECCVDVKPISQEKIESERALISQCGKPVVNVSYRPAYDQGGPVEILPFLYLGSAYHASKCEFLANLHITALLNVSRRTSEACATHLHYKWIPVEDSHTADISSHFQEAIDFIDCVREKGGKVLVHCEAGISRSPTICMAYLMKTKQFRLKEAFDYIKQRRSMVSPNFGFMGQLLQYESEILPSTPNPQPPSCQGEAAGSSLIGHLQTLSPDMQGAYCTFPASVLAPVPTHSTVSELSRSPVATATSC

SEQ ID NO: 2561 - protein, 243 aa, Homo sapiens
LLIFYYSFAIVGMEFFCGIVFPNCCNTSTVADAYRWRNHTVGNRTVVEEGYYYLNNFDNILNSFVTLFELTVVNNWYIIMEGVTSQTSHWSRLYFMTFYIVTMVVMTIIVAFILEAFVFRMNYSRKNQDSEVDGGITLEKEISKEELVAVLELYREARGASSDVTRLLETLSQMERYQQHSMVFLGRRSRTKSDLSLKMYQEEIQEWYEEHAREQEQQRQLSSSAAPAAQQPPGSRQRSQTVT

SEQ ID NO: 2562 - protein, 497 aa, Homo sapiens
RALNFLFYLALVAAAAFSGWCVHHVLEEVQQVRRSHQDFSRQREELGQGLQGVEQKVQSLQATFGTFESILRSSQHKQDLTEKAVKQGESEVSRISEVLQKLQNEILKDLSDGIHVVKDARERDFTSLENTVEERLTELTKSINDNIAIFTEVQKRSQKEINDMKAKVASLEESEGNKQDLKALKEAVKEIQTSAKSREWDMEALRSTLQTMESDIYTEVRELVSLKQEQQAFKEAADTERLALQALTEKLLRSEESVSRLPEEIRRLEEELRQLKSDSHGPKEDGGFRHSEAFEALQQKSQGLDSRLQHVEDGVLSMQVASARQTESLESLLSKSQEHEQRLAALQGRLEGLGSSEADQDGLASTVRSLGETQLVLYGDVEELKRSVGELPSTVESLQKVQEQVHTLLSQDQAQAARLPPQDFLDRLSSLDNLKASVSQVEADLKMLRTAVDSLVAYSVKIETNENNLESAKGLLDDLRNDLDRLFVKVEKIHEKV

SEQ ID NO: 2563 - protein, 9 aa, Homo sapiens
IFFGKVFLV

SEQ ID NO: 2564 - protein, 106 aa, Homo sapiens
LTLEPTFHHLLPIMQVSTAALAVLLCTMALCNQVLSAPLAADTPTACCFSYTSRQIPQNFIADYFETSSQCSKPSVIFLTKRGRQVCADPSEEWVQKYVSDLELSA

SEQ ID NO: 2565 - protein, 1012 aa, Homo sapiens
VLLLWGILGAIQAQQQEVISPDTTERNNNCPEKTDCPIHVYFVLDTSESVTMQSPTDILLFHMKQFVPQFISQLQNEFYLDQVALSWRYGGLHFSDQVEVFSPPGSDRASFIKNLQGISSFRRGTFTDCALANMTEQIRQDRSKGTVHFAVVITDGHVTGSPCGGIKLQAERAREEGIRLFAVAPNQNLKEQGLRDIASTPHELYRNDYATMLPDSTEIDQDTINRIIKVMKHEAYGECYKVSCLEIPGPSGPKGYRGQKGAKGNMGEPGEPGQKGRQGDPGIEGPIGFPGPKGVPGFKGEKGEFGADGRKGAPGLAGKNGTDGQKGKLGRIGPPGCKGDPGNRGPDGYPGEAGSPGERGDQGGKGDPGRPGRRGPPGEIGAKGSKGYQGNSGAPGSPGVKGAKGGPGPRGPKGEPGRRGDPGTKGSPGSDGPKGEKGDPGPEGPRGLAGEVGNKGAKGDRGLPGPRGPQGALGEPGKQGSRGDPGDAGPRGDSGQPGPKGDPGRPGFSYPGPRGAPGEKGEPGPRGPEGGRGDFGLKGEPGRKGEKGEPADPGPPGEPGPRGPRGVPGPEGEPGPPGDPGLTECDVMTYVRETCGCCDCEKRCGALDVVFVIDSSESIGYTNFTLEKNFVINVVNRLGAIAKDPKSETGTRVGVVQYSHEGTFEAIQLDDERIDSLSSFKEAVKNLEWIAGGTWTPSALKFAYDRLIKESRRQKTRVFAVVITDGRHDPRDDDLNLRALCDRDVTVTAIGIGDMFHEKHESENLYSIACDKPQQVRNMTLFSDLVAEKFIDDMEDVLCPDPQIVCPDLPCQTELSVAQCTQRPVDIVFLLDGSERLGEQNFHKARRFVEQVARRLTLARRDDDPLNARVALLQFGGPGEQQVAFPLSHNLTAIHEALETTQYLNSFSHVGAGVVHAINAIVRSPRGGARRHAELSFVFLTDGVTGNDSLHESAHSMRKQNVVPTVLALGSDVDMDVLTTLSLGDRAAVFHEKDYDSLAQPGFFDRFIRWIC

SEQ ID NO: 2566 - protein, 44 aa, Homo sapiens
LLPPLALLLLLAALVAPATAATAYRPDWNRLSGLTRARVETCGG

SEQ ID NO: 2567 - protein, 143 aa, Homo sapiens
LGVLLLVFVLGLGLTPPTLAQDNSRYTHFLTQHYDAKPQGRDDRYCESIMRRRGLTSPCKDINTFIHGNKRSIKAICENKNGNPHRENLRISKSSFQVTTCKLHGGSPWPPCQYRATAGFRNVVVACENGLPVHLDQSIFRRP

SEQ ID NO: 2568 - protein, 16 aa, Homo sapiens
MTVAGVVLLGSLFSRK

SEQ ID NO: 2569 - protein, 643 aa, Homo sapiens
MVVILGASNILWIMFAASQAFKIETTPESRYLAQIGDSVSLTCSTTGCESPFFSWRTQIDSPLNGKVTNEGTTSTLTMNPVSFGNEHSYLCTATCESRKLEKGIQVEIYSFPKDPEIHLSGPLEAGKPITVKCSVADVYPFDRLEIDLLKGDHLMKSQEFLEDADRKSLETKSLEVTFTPVIEDIGKVLVCRAKLHIDEMDSVPTVRQAVKELQVYISPKNTVISVNPSTKLQEGGSVTMTCSSEGLPAPEIFWSKKLDNGNLQHLSGNATLTLIAMRMEDSGIYVCEGVNLIGKNRKEVELIVQAFPRDPEIEMSGGLVNGSSVTVSCKVPSVYPLDRLEIELLKGETILENIEFLEDTDMKSLENKSLEMTFIPTIEDTGKALVCQAKLHIDDMEFEPKQRQSTQTLYVNVAPRDTTVLVSPSSILEEGSSVNMTCLSQGFPAPKILWSRQLPNGELQPLSENATLTLISTKMEDSGVYLCEGINQAGRSRKEVELIIQVTPKDIKLTAFPSESVKEGDTVIISCTCGNVPETWIILKKKAETGDTVLKSIDGAYTIRKAQLKDAGVYECESKNKVGSQLRSLTLDVQGRENNKDYFSPELLVLYFASSLIIPAIGMIIYFARKANMKGSYSLVEAQKSKV

SEQ ID NO: 2570 - protein, 266 aa, Homo sapiens [sequence omitted]

SEQ ID NO: 2571 - protein, 1493 aa, Homo sapiens
MVSVVGPMGLLVVLLVGGCAAEEPPRFIKEPKDQIGVSGGVASFVCQATGDPKPRVTWNKKGKKVNSQRFETIEFDESAGAVLRIQPLRTPRDENVYECVAQNSVGEITVHAKLTVLREDQLPSGFPNIDMGPQLKVVERTRTATMLCAASGNPDPEITWFKDFLPVDPSASNGRIKQLRSGALQIESSEETDQGKYECVATNSAGVRYSSPANLYVRVRRVAPRFSILPMSHEIMPGGNVNITCVAVGSPMPYVKWMQGAEDLTPEDDMPVGRNVLELTDVKDSANYTCVAMSSLGVIEAVAQITVKSLPKAPGTPMVTENTATSITITWDSGNPDPVSYYVIEYKSKSQDGPYQIKEDITTTRYSIGGLSPNSEYEIWVSAVNSIGQGPPSESVVTRTGEQAPASAPRNVQARMLSATTMIVQWEEPVEPNGLIRGYRVYYTMEPEHPVGNWQKHNVDDSLLTTVGSLLEDETYTVRVLAFTSVGDGPLSDPIQVKTQQGVPGQPMNLRAEARSETSITLSWSPPRQESIIKYELLFREGDHGREVGRTFDPTTSYVVEDLKPNTEYAFRLAARSPQGLGAFTPVVRQRTLQSISPKNFKVKMIMKTSVLLSWEFPDNYNSPTPYKIQYNGLTLDVDGRTTKKLITHLKPHTFYNFVLTNRGSSLGGLQQTVTAWTAFNLLNGKPSVAPKPDADGFIMVYLPDGQSPVPVQSYFIVMVPLRKSRGGQFLTPLGSPEDMDLEELIQDISRLQRRSLRHSRQLEVPRPYIAARFSVLPPTFHPGDQKQYGGFDNRGLEPGHRYVLFVLAVLQKSEPTFAASPFSDPFQLDNPDPQPIVDGEEGLIWVIGPVLAVVFIICIVIAILLYKKKPHSKRKDSEPRTKCLLNNADLAPHHPKDPVEMRRINFQTPGMLSHPPIPIADMAEHTERLKANDSLKLSQEYESIDPGQQFTWEHSNLEVNKPKNRYANVIAYDHSRVILQPIEGIMGSDYINANYVDGYRCQNAYIATQGPLPETFGDFWRMVWEQRSATIVMMTRLEEKSRIKCDQYWPNRGTETYGFIQVTLLDTIELATFCVRTFSLHKNGSSEKREVRQFQFTAWPDHGVPEYPTPFLAFLRRVKTCNPPDAGPIVVHCSAGVGRTGCFIVIDAMLERIKPEKTVDVYGHVTLMRSQRNYMVQTEDQYSFIHEALLEAVGCGNTEVPARSLYAYIQKLAQVEPGEHVTGMELEFKRLANSKAHTSRFISANLPCNKFKNRLVNIMPYESTRVCLQPIRGVEGSDYINASFIDGYRQQKAYIATQGPLAETTEDFWRMLWENNSTIVVMLTKLREMGREKCHQYWPAERSARYQYFVVDPMAEYNMPQYILREFKVTDARDGQSRTVRQFQFTDWPEQGVPKSGEGFIDFIGQVHKTKEQFGQDGPISVHCSAGVGRTGVFITLSIVLERMRYEGVVDIFQTVKMLRTQRPAMVQTEDEYQFCYQAALEYLGSFDHYAT

SEQ ID NO: 2572 - protein, 72 aa, Homo sapiens
MAWTKYQLFLAGLMLVTGSINTLSAKRFLPSTQSAETRLAKGDPKASEEHTPLDKEAALQPPGSRSISSSSL

SEQ ID NO: 2573 - protein, 63 aa, Homo sapiens
MCCTKSLLLAALMSVLLLHLCGESEASNFDCCLGYTDRILHPKFIVGFTRQLANEGCDINAIM

SEQ ID NO: 2574 - protein, 201 aa, Homo sapiens
KDTSRANICFKFLGLLTACRMLLEPGRGCCALAILLAIVDIQSGGCINITSSASQEGTRLNLICTVWHKKEEAEGFVVFLCKDRSGDCSPETSLKQLRLKRDPGIDGVGEISSQLMFTISQVTPLHSGTYQCCARSQKSGIRLQGHFFSILFTETGNYTVTGLKQRQHLEFSHNEGTLSSGFLQEKVWVMLVTSLVALQAL

SEQ ID NO: 2575 - protein, 87 aa, Homo sapiens
MTAWILLPVSLSAFSITGIWTVYAMAVMNHHVCPVENWSYNESCPPDPAEQGGPKTCCTLDDVPLISGPDLPPALRAAPGAESALLG

SEQ ID NO: 2576 - protein, 112 aa, Homo sapiens
LKSSFLRGLGSWKSNPLRLGGWTILLTLTMGQGEPGGPQGDPWVPHELLLPSLCDSSHASSWGSGSITCAWRGGDSSSHPLVSGHILSNSPVAAVMCSSMGTHLSPFKGTLL

SEQ ID NO: 2577 - protein, 308 aa, Homo sapiens
VRTAALALLLGALHWAPARCEEYDYYGWQAEPLHGRSYSKPPQCLDIPADLPLCHTVGYKRMRLPNLLEHESLAEVKQQASSWLPLLAKRCHSDTQVFLCSLFAPVCLDRPIYPCRSLCEAVRAGCAPLMEAYGFPWPEMLHCHKFPLDNDLCIAVQFGHLPATAPPVTKICAQCEMEHSADGLMEQMCSSDFVVKMRIKEIKIENGDRKLIGAQKKKKLLKPGPLKRKDTKRLVLHMKNGAGCPCPQLDSLAGSFLVMGRKVDGQLLLMAVYRWDKKNKEMKFAVKFMFSYPCSLYYPFFYGAAEPH

SEQ ID NO: 2578 - protein, 856 aa, Homo sapiens
IPPSQQITMLQTKDLIWTLFFLGTAVSLQVDIVPSQGEISVGESKFFLCQVAGDAKDKDISWFSPNGEKLTPNQQRISVVWNDDSSSTLTIYNANIDDAGIYKCVVTGEDGSESEATVNVKIFQKLMFKNAPTPQEFREGEDAVIVCDVVSSLPPTIIWKHKGRDVILKKDVRFIVLSNNYLQIRGIKKTDEGTYRCEGRILARGEINFKDIQVIVNVPPTIQARQNIVNATANLGQSVTLVCDAEGFPEPTMSWTKDGEQIEQEEDDEKYIFSDDSSQLTIKKVDKNDEAEYICIAENKAGEQDATIHLKVFAKPKITYVENQTAMELEEQVTLTCEASGDPIPSITWRTSTRNISSEEKTLDGHMVVRSHARVSSLTLKSIQYTDAGEYICTASNTIGQDSQSMYLEVQYAPKLQGPVAVYTWEGNQVNITCEVFAYPSATISWFRDGQLLPSSNYSNIKIYNTPSASYLEVTPDSENDFGNYNCTAVNRIGQESLEFILVQADTPSSPSIDQVEPYSSTAQVQFDEPEATGGVPILKYKAEWRAVGEEVWHSKWYDAKEASMEGIVTIVGLKPETTYAVRLAALNGKGLGEISAASEFKTQPVQGEPSAPKLEGQMGEDGNSIKVNLIKQDDGGSPIRHYLVRYRALSSEWKPEIRLPSGSDHVMLKSLDWNAEYEVYVVAENQQGKSKAAHFVFRTSAQPTAIPANGSPTSGLSTGAIVGILIVIFVLLLVVVDITCYFLNKCGLFMCIAVNLCGKAGPGAKGKDMEEGKAAFSKDESKEPIVEVRTEEERTPNHDGGKHTEPNETTPLTEPEKGPVEAKPECQETETKPAPAEVKTVPNDATQTKENESKA

SEQ ID NO: 2579 - protein, 273 aa, Homo sapiens
RLHARQSMRVTLATIAWMVSFVSNYSHTANILPDIENEDFIKDCVRIHNKFRSEVKPTASDMLYMTWDPALAQIAKAWASNCQFSHNTRLKPPHKLHPNFTSLGENIWTGSVPIFSVSSAITNWYDEIQDYDFKTRICKKVCGHYTQVVWADSYKVGCAVQFCPKVSGFDALSNGAHFICNYGPGGNYPTWPYKRGATCSACPNNDKCLDNLCVNRQRDQVKRYYSVVYPGWPIYPRNRYTSLFLIVNSVILILSVIITILVQHKYPNLVLLD

SEQ ID NO: 2580 - protein, 16 aa, Homo sapiens
VDLLKVMIFFGKVFLV

SEQ ID NO: 2581 - protein, 244 aa, Homo sapiens
ILLLLAFLLLPRADAGEIIGGHEAKPHSRPYMAYLMIWDQKSLKRCGGFLIRDDFVLTAAHCWGSSINVTLGAHNIKEQEPTQQFIPVKRPIPHPAYNPKNFSNDIMLLQLERKAKRTRAVQPLRLPSNKAQVKPGQTCSVAGWGQTAPLGKHSHTLQEVKMTVQEDRKCESDLRHYYDSTIELCVGDPEIKKTSFKGDSGGPLVCNKVAQGIVSYGRNNGMPPRACTKVSSFVHWIKKTMKRY

SEQ ID NO: 2582 - protein, 185 aa, Homo sapiens
LTLAVIAILLFILLWHLCWPKEKADPYPYPGLVCGVPNTHTPSSSHLSSPGALETGDTWKEASLLPLLSRELSSLASQPLSRLLDELEVLEELIVLLDPEPGPGGGMAHGTTRHLAARYGLPAAWSTFAYSLRPSRSPLRALIEMVVAREPSASLGQLGTHLAQLGRADALRVLSKLGSSGVCWA

SEQ ID NO: 2583 - protein, 332 aa, Homo sapiens
LWSLLLLLGVFAAAAAAPPDPLSQLPAPQHPKIRLYNAEQVLSWEPVALSNSTRPVVYQVQFKYTDSKWFTADIMSIGVNCTQITATECDFTAASPSAGFPMDFNVTLRLRAELGALHSAWVTMPWFQHYRNVTVGPPENIEVTPGEGSLIIRFSSPFDIADTSTAFFCYYVHYWEKGGIQQVKGPFRSNSISLDNLKPSRVYCLQVQAQLLWNKSNIFRVGHLSNISCYETMADASTELQQVILISVGTFSLLSVLAGACFFLVLKYRGLIKYWFHTPPSIPLQIEEYLKDPTQPILEALDKDSSPKDDVWDSVSIISFPEKEQEDVLQTL

SEQ ID NO: 2584 - protein, 113 aa, Homo sapiens
ILAFSRSLHSLLVDVPAFACLSALVLITDRHGLQEPRRVEELQNRIASCLKEHVAAVAGEPQPASCLSRLLGKLPELRTLCTQGLQRIFYLKLEDLVPPPPIIDKIFMDTLPF

SEQ ID NO: 2585 - protein, 22 aa, Homo sapiens
IVQFLLLVGFLSCVSLVFVKFN

SEQ ID NO: 2586 - protein, 251 aa, Homo sapiens
LLQMLPLLWLLPHSWAVPEAPTPMWPDDLQNHTFLHTVYCQDGSPSVGLSEAYDEDQLFFFDFSQNTRVPRLPEFADWAQEQGDAPAILFDKEFCEWMIQQIGPKLDGKIPVSRGFPIAEVFTLKPLEFGKPNTLVCFVSNLFPPMLTVNWQHHSVPVEGFGPTFVSAVDGLSFQAFSYLNFTPEPSDIFSCIVTHEIDRYTAIAYWVPRNALPSDLLENVLCGVAFGLGVLGIIVGIVLIIYFRKPCSGD

SEQ ID NO: 2587 - protein, 36 aa, Homo sapiens
LGLIIFSLGVISWRRAGHSSYTPLPGSNYSEGWHIS

SEQ ID NO: 2588 - protein, 18 aa, Homo sapiens
MTALQIASFILLRLFAED

SEQ ID NO: 2589 - protein, 19 aa, Homo sapiens
ITLRFLLLMRTLSAYAKKF

SEQ ID NO: 2590 - protein, 18 aa, Homo sapiens
LFFLKKYTSCLLYFALGT

SEQ ID NO: 2591 - protein, 112 aa, Homo sapiens
LAFSRSLHSLLVDVPAFACLSALVLITDRHGLQEPRRVEELQNRIASCLKEHVAAVAGEPQPASCLSRLLGKLPELRTLCTQGLQRIFYLKLEDLVPPPPIIDKIFMDTLPF

SEQ ID NO: 2592 - protein, 234 aa, Homo sapiens
IMWQLLLPTALLLLVSAGMRTEDLPKAVVFLEPQWYSVLEKDSVTLKCQGAYSPEDNSTQWFHNENLISSQASSYFIDAATVNDSGEYRCQTNLSTLSDPVQLEVHIGWLLLQAPRWVFKEEDPIHLRCHSWKNTALHKVTYLQNGKDRKYFHHNSDFHIPKATLKDSGSYFCRGLVGSKNVSSETVNITITQGLAVSTISSFSPPGYQVSFCLVMVLLFAVDTGLYFSVKTNI

SEQ ID NO: 2593 - protein, 321 aa, Homo sapiens
LSNILFVMAFLLSGAAPLKIQAYFNETADLPCQFANSQNQSLSELVVFWQDQENLVLNEVYLGKEKFDSVHSKYMGRTSFDSDSWTLRLHNLQIKDKGLYQCIIHHKKPTGMIRIHQMNSELSVLANFSQPEIVPISNITENVYINLTCSSIHGYPEPKKMSVLLRTKNSTIEYDGVMQKSQDNVTELYDVSISLSVSFPDVTSNMTIFCILETDKTRLLSSPFSIELEDPQPPPDHIPWITAVLPTVIICVMVFCLILWKWKKKKRPRNSYKCGTNTMEREESEQTKKREKIHIPERSDEAQRVFKSSKTSSCDKSDTCF

SEQ ID NO: 2594 - protein, 20 aa, Homo sapiens
RSRWWDLTVGPISLFSALLA

SEQ ID NO: 2595 - protein, 12 aa, Homo sapiens
LNLLSLAVYIFT

SEQ ID NO: 2596 - protein, 30 aa, Homo sapiens
LVLHLASLQLGLLLNGVCSLAEELRHIHSR

SEQ ID NO: 2597 - protein, 237 aa, Homo sapiens
LLWPGAALLVLLGVAASLCVRCSRPGAKRSEKIYQQRSLREDQQSFTGSRTYSLVGQAWPGPLADMAPTRKDKLLQFYPSLEDPASSRYQNFSKGSRHGSEEAYIDPIAMEYYNWGRFSKPPEDDDANSYENVLICKQKTTETGAQQEGIGGLCRGDLSLSLALKTGPTSGLCPSASPEEDEESEDYQNSASIHQWRESRKVMGQLQREASPGPVGSPDEEDGEPDYVNGEVAATEA

SEQ ID NO: 2598 - protein, 630 aa, Homo sapiens
VIFFGFSSSFIFLPKLLLVGEKKMPQLNGGGGDDLGANDELISFKDEGEQEEKSSENSSAERDLADVKSSLVNESETNQNSSSDSEAERRPPPRSESFRDKSRESLEEAAKRQDGGLFKGPPYPGYPFIMIPDLTSPYLPNGSLSPTARTLHFQSGSTHYSAYKTIEHQIAVQYLQMKWPLLDVQAGSLQSRQALKDARSPSPAHIVSNKVPVVQHPHHVHPLTPLITYSNEHFTPGNPPPHLPADVDPKTGIPRPPHPPDISPYYPLSPGTVGQIPHPLGWLVPQQGQPVYPITTGGFRHPYPTALTVNASMSSFLSSRFPPHMVPPHHTLHTTGIPHPAIVTPTVKQESSQSDVGSLHSSKHQDSKKEEEKKKPHIKKPLNAFMLYMKEMRAKVVAECTLKESAAINQILGRRWHALSREEQAKYYELARKERQLHMQLYPGWSARDNYGKKKKRKRDKQPGETNDANTPKKCRALFGLDRQTLWCKPCRRKKKCVRYIQGEGSCLSPPSSDGSLLDSPPPSPNLLGSPPRDAKSQTEQTQPLSLSLKPDPLAHLSMMPPPPALLLAEATHKASALCPNGALDLPPAALQPAAPSSSIAQPSTSSLHSHSSLAGTQPQPLSLVTKSLE

SEQ ID NO: 2599 - protein, 619 aa, Homo sapiens
VIFFGFSSSFIFLPKLLLVGEKKMPQLNGGGGDDLGANDELISFKDEGEQEEKSSENSSAERDLADVKSSLVNESETNQNSSSDSEAERRPPPRSESFRDKSRESLEEAAKRQDGGLFKGPPYPGYPFIMIPDLTSPYLPNGSLSPTARTYLQMKWPLLDVQAGSLQSRQALKDARSPSPAHIVSNKVPVVQHPHHVHPLTPLITYSNEHFTPGNPPPHLPADVDPKTGIPRPPHPPDISPYYPLSPGTVGQIPHPLGWLVPQQGQPVYPITTGGFRHPYPTALTVNASMSRFPPHMVPPHHTLHTTGIPHPAIVTPTVKQESSQSDVGSLHSSKHQDSKKEEEKKKPHIKKPLNAFMLYMKEMRAKVVAECTLKESAAINQILGRRWHALSREEQAKYYELARKERQLHMQLYPGWSARDNYGKKKKRKRDKQPGETNEHSECFLNPCLSLPPITDLSAPKKCRARFGLDQQNNWCGPCRRKKKCVRYIQGEGSCLSPPSSDGSLLDSPPPSPNLLGSPPRDAKSQTEQTQPLSLSLKPDPLAHLSMMPPPPALLLAEATHKASALCPNGALDLPPAALQPAAPSSSIAQPSTSSLHSHSSLAGTQPQPLSLVTKSLE

SEQ ID NO: 2600 - protein, 466 aa, Homo sapiens
LHFAAKYGLKNLTALLLTCPGALQAYSVANKHGHYPNTIAEKHGFRDLRQFIDEYVETVDMLKSHIKEELMHGEEADAVYESMAHLSTDLLMKCSLNPGCDEDLYESMAAFVPAATEDLYVEMLQASTSNPIPGDGFSRATKDSMIRKFLEGNSMGMTNLERDQCHLGQEEDVYHTVDDDEAFSVDLASRPPVPVPRPETTAPGAHQLPDNEPYIFKVFAEKSQERPGNFYVSSESIRKGPPVRPWRDRPQSSIYDPFAGMKTPGQRQLITLQEQVKLGIVNVDEAVLHFKEWQLNQKKRSESFRFQQENLKRLRDSITRRQREKQKSGKQTDLEITVPIRHSQHLPAKVEFGVYESGPRKSVIPPRTELRRGDWKTDSTSSTASSTSNRSSTRSLLSVSSGMEGDNEDNEVPEVTRSRSPGPPQVDGTPTMSLERPPRVPPRAASQRPPTRETFHPPPPVPPRGR

SEQ ID NO: 2601 - protein, 21 aa, Homo sapiens
RPCYAVYLGVLYVLLPMPSLK

SEQ ID NO: 2602 - protein, 29 aa, Homo sapiens
MQPILLLLAFLLLPRADADFSFRGDHRGT

SEQ ID NO: 2603 - protein, 11 aa, Homo sapiens
VVSFLRILATL

SEQ ID NO: 2604 - protein, 63 aa, Homo sapiens
KLCVTVLSLLVLVAAFCSLALSAPMGSDPPTACCFSYTARKLPRNFVVDYYETSSLCSQPAVV

SEQ ID NO: 2605 - protein, 45 aa, Homo sapiens
VLILFLGASMVYLIRVARRNQERALRTVWSSGDDKEQLVKNTYVL

SEQ ID NO: 2606 - protein, 76 aa, Homo sapiens
ILLFCAVVPGTLLLFRKRWQNEKLGLDAGDEYEDENLYEGLNLDDCSMYEDISRGLQGTYQDVGSLNIGDVQLEKP

SEQ ID NO: 2607 - protein, 73 aa, Homo sapiens
VCLMGHERRQTLNLISLLALRVLAEQNIIPSATNVTCYYQPAPYVSDGNFSNYYVAHPPVTYSQPYPTWLPCN

SEQ ID NO: 2608 - protein, 318 aa, Homo sapiens
ILFVMAFLLSGAAPLKIQAYFNETADLPCQFANSQNQSLSELVVFWQDQENLVLNEVYLGKEKFDSVHSKYMGRTSFDSDSWTLRLHNLQIKDKGLYQCIIHHKKPTGMIRIHQMNSELSVLANFSQPEIVPISNITENVYINLTCSSIHGYPEPKKMSVLLRTKNSTIEYDGVMQKSQDNVTELYDVSISLSVSFPDVTSNMTIFCILETDKTRLLSSPFSIELEDPQPPPDHIPWITAVLPTVIICVMVFCLILWKWKKKKRPRNSYKCGTNTMEREESEQTKKREKIHIPERSDEAQRVFKSSKTSSCDKSDTCF

SEQ ID NO: 2609 - protein, 170 aa, Homo sapiens
IFFLELAVAVLAFLFQDWVRDRFREFFESNIKSYRDDIDLQNLIDSLQKANQCCGAYGPEDWDLNVYFNCSGASYSREKCGVPFSCCVPDPAQKVVNTQCGYDVRIQLKSKWDESIFTKGCIQALESWLPRNIYIVAGVFIAISLLQIFGIFLARTLISDIEAVKAGHHF

SEQ ID NO: 2610 - protein, 22 aa, Homo sapiens
MIFGMIFSMILCCAIRRNREMV

SEQ ID NO: 2611 - protein, 13 aa, Homo sapiens
MKMTLLLMIPVLL

SEQ ID NO: 2612 - protein, 1159 aa, Homo sapiens
RAALLLFTALATSLGFNLDTEELTAFRVDSAGFGDSVVQYANSWVVVGAPQKITAANQTGGLYQCGYSTGACEPIGLQVPPEAVNMSLGLSLASTTSPSQLLACGPTVHHECGRNMYLTGLCFLLGPTQLTQRLPVSRQECPRQEQDIVFLIDGSGSISSRNFATMMNFVRAVISQFQRPSTQFSLMQFSNKFQTHFTFEEFRRSSNPLSLLASVHQLQGFTYTATAIQNVVHRLFHASYGARRDAAKILIVITDGKKEGDSLDYKDVIPMADAAGIIRYAIGVGLAFQNRNSWKELNDIASKPSQEHIFKVEDFDALKDIQNQLKEKIFAIEGTETTSSSSFELEMAQEGFSAVFTPDGPVLGAVGSFTWSGGAFLYPPNMSPTFINMSQENVDMRDSYLGYSTELALWKGVQSLVLGAPRYQHTGKAVIFTQVSRQWRMKAEVTGTQIGSYFGASLCSVDVDSDGSTDLVLIGAPHYYEQTRGGQVSVCPLPRGWRRWWCDAVLYGEQGHPWGRFGAALTVLGDVNGDKLTDVVIGAPGEEENRGAVYLFHGVLGPSISPSHSQRIAGSQLSSRLQYFGQALSGGQDLTQDGLVDLAVGARGQVLLLRTRPVLWVGVSMQFIPAEIPRSAFECREQVVSEQTLVQSNICLYIDKRSKNLLGSRDLQSSVTLDLALDPGRLSPRATFQETKNRSLSRVRVLGLKAHCENFNLLLPSCVEDSVTPITLRLNFTLVGKPLLAFRNLRPMLAADAQRYFTASLPFEKNCGADHICQDNLGISFSFPGLKSLLVGSNLELNAEVMVWNDGEDSYGTTITFSHPAGLSYRYVAEGQKQGQLRSLHLTCDSAPVGSQGTWSTSCRINHLIFRGGAQITFLATFDVSPKAVLGDRLLLTANVSSENNTPRTSKTTFQLELPVKYAVYTVVSSHEQFTKYLNFSESEEKESHVAMHRYQVNNLGQRDLPVSINFWVPVELNQEAVWMDVEVSHPQNPSLRCSSEKIAPPASDFLAHIQKNPVLDCSIAGCLRFRCDVPSFSVQEELDFTLKGNLSFGWVRQILQKKVSVVSVAEITFDTSVYSQLPGQEAFMRAQTTTVLEKYKVHNPTPLIVGSSIGGLLLLALITAVLYKVGFFKRQYKEMMEEANGQIAPENGTQTPSPPSEK

SEQ ID NO: 2613 - protein, 350 aa, Homo sapiens
VLFSGALLGLLAAQGTGNDCPHKKSATLLPSFTVTPTVTESTGTTSHRTTKSHKTTTHRTTTTGTTSHGPTTATHNPTTTSHGNVTVHPTSNSTATSQGPSTATHSPATTSHGNATVHPTSNSTATSPGFTSSAHPEPPPPSPSPSPTSKETIGDYTWTNGSQPCVHLQAQIQIRVMYTTQGGGEAWGISVLNPNKTKVQGSCEGAHPHLLLSFPYGHLSFGFMQDLQQKVVYLSYMAVEYNVSFPHAAQWTFSAQNASLRDLQAPLGQSFSCSNSSIILSPAVHLDLLSLRLQAAQLPHTGVFGQSFSCPSDRSILLPLIIGLILLGLLALVLIAFCIIRRRPSAYQAL

SEQ ID NO: 2614 - protein, 60 aa, Homo sapiens
LKLLLLLLLFGVAGGLVACRVTELQQQPLCTSVNTIYDNAVQGLRRHEILQWVLQTDSQQ

SEQ ID NO: 2615 - protein, 15 aa, Homo sapiens
VVFPEQGLAILLWMC

SEQ ID NO: 2616 - protein, 49 aa, Homo sapiens
ISVTMILVAWMVIALILFLLRPPNLRGSSLPGKPTSPHNGQDPPAPPVD

SEQ ID NO: 2617 - protein, 34 aa, Homo sapiens
MLMMMALLVPLVYTIKRHKWSVLKSRKLAYRPPK

SEQ ID NO: 2618 - protein, 41 aa, Homo sapiens
LGSIAGVFVYQLMIGCHLEQPPPSNEEENVKLAHVKHKEQI

SEQ ID NO: 2619 - protein, 20 aa, Homo sapiens
KGPKLTLVLQMWMFMAQIGT

SEQ ID NO: 2620 - protein, 18 aa, Homo sapiens
ILVAFGVFIPTLFCLCRL

SEQ ID NO: 2621 - protein, 39 aa, Homo sapiens [sequence omitted]

SEQ ID NO: 2622 - protein, 1027 aa, Homo sapiens
RTVLAQMAGISYVASFFLLLTKLSIGQREVTVQKGPLFRAEGYPVSIGCNVTGHQGPSEQHFQWSVYLPTNPTQEVQIISTKDAAFSYAVYTQRVRSGDVYVERVQGNSVLLHISKLQMKDAGEYECHTPNTDEKYYGSYSAKTNLIVIPDTLSATMSSQTLGKEEGEPLALTCEASKATAQHTHLSVTWYLTQDGGGSQATEIISLSKDFILVPGPLYTERFAASDVQLNKLGPTTFRLSIERLQSSDQGQLFCEATEWIQDPDETWMFITKKQTDQTTLRIQPAVKDFQVNITADSLFAEGKPLELVCLVVSSGRDPQLQGIWFFNGTEIAHIDAGGVLGLKNDYKERASQGELQVSKLGPKAFSLKIFSLGPEDEGAYRCVVAEVMKTRTGSWQVLQRKQSPDSHVHLRKPAARSVVMSTKNKQQVVWEGETLAFLCKAGGAESPLSVSWWHIPRDQTQPEFVAGMGQDGIVQLGASYGVPSYHGNTRLEKMDWATFQLEITFTAITDSGTYECRVSEKSRNQARDLSWTQKISVTVKSLESSLQVSLMSRQPQVMLTNTFDLSCVVRAGYSDLKVPLTVTWQFQPASSHIFHQLIRITHNGTIEWGNFLSRFQKKTKVSQSLFRSQLLVHDATEEETGVYQCEVEVYDRNSLYNNRPPRASAISHPLRIAVTLPESKLKVNSRSQVQELSINSNTDIECSILSRSNGNLQLAIIWYFSPVSTNASWLKILEMDQTNVIKTGDEFHTPQRKQKFHTEKVSQDLFQLHILNVEDSDRGKYHCAVEEWLLSTNGTWHKLGEKKSGLTELKLKPTGSKVRVSKVYWTENVTEHREVAIRCSLESVGSSATLYSVMWYWNRENSGSKLLVHLQHDGLLEYGEEGLRRHLHCYRSSSTDFVLKLHQVEMEDAGMYWCRVAEWQLHGHPSKWINQASDESQRMVLTVLPSEPTLPSRICSSAPLLYFLFICPFVLLLLLLISLLCLYWKARKLSTLRSNTRKEKALWVDLKEAGGVTTNRREDEEEDEGN

SEQ ID NO: 2623 - protein, 98 aa, Homo sapiens
VIVVGLIVSLLTGRMRGRSLNPATIYPVLPKLLSLLPLSCQKRLHCRSYGQDHLDTGLFPEKPRNGVLGDSRDKEAMALDGTAYQGSSSTCILQETSL

SEQ ID NO: 2624 - protein, 48 aa, Homo sapiens
KYILQLFKTCRGLFVLCQYCGLLQIYSADTPSSSYTQSTMDHDLHDAL

SEQ ID NO: 2625 - protein, 440 aa, Homo sapiens
KMKLANWYWLSSAVLATYGFLVVANNETEEIKDERAKDVCPVRLESRGKCEEAGECPYQVSLPPLTIQLPKQFSRIEEVFKEVQNLKEIVNSLKKSCQDCKLQADDNGDPGRNGLLLPSTGAPGEVGDNRVRELESEVNKLSSELKNAKEEINVLHGRLEKLNLVNMNNIENYVDSKVANLTFVVNSLDGKCSKCPSQEQIQSRPVQHLIYKDCSDYYAIGKRSSETYRVTPDPKNSSFEVYCDMETMGGGWTVLQARLDGSTNFTRTWQDYKAGFGNLRREFWLGNDKIHLLTKSKEMILRIDLEDFNGVELYALYDQFYVANEFLKYRLHVGNYNGTAGDALRFNKHYNHDLKFFTTPDKDNDRYPSGNCGLYYSSGWWFDACLSANLNGKYYHQKYRGVRNGIFWGTWPGVSEAHPGGYKSSFKEAKMMIRPKHFKP

SEQ ID NO: 2626 - protein, 374 aa, Homo sapiens
LTAHPSCLLALLVAGLAQGIRGPLRAQDLGPQPLELKEAFKLFQIQFNRSYLSPEEHAHRLDIFAHNLAQAQRLQEEDLGTAEFGVTPFSDLTEEEFGQLYGYRRAAGGVPSMGREIRSEEPEESVPFSCDWRKVASAISPIKDQKNCNCCWAMAAAGNIETLWRISFWDFVDVSVQELLDCGRCGDGCHGGFVWDAFITVLNNSGLASEKDYPFQGKVRAHRCHPKKYQKVAWIQDFIMLQNNEHRIAQYLATYGPITVTINMKPLQLYRKGVIKATPTTCDPQLVDHSVLLVGFGSVKSEEGIWAETVSSQSQPQPPHPTPYWILKNSWGAQWGEKGYFRLHRGSNTCGITKFPLTARVQKPDMKPRVSCPP

SEQ ID NO: 2627 - protein, 39 aa, Homo sapiens
ILVPCVLGLLLLPILAMLMALCVHCHRLPGSYDSTSSDR

SEQ ID NO: 2628 - protein, 1160 aa, Homo sapiens
RFWLLPAMALRVLLLTALTLCHGFNLDTENAMTFQENARGFGQSVVQLQGSRVVVGAPQEIVAANQRGSLYQCDYSTGSCEPIRLQVPVEAVNMSLGLSLAATTSPPQLLACGPTVHQTCSENTYVKGLCFLFGSNLRQQPQKFPEALRGCPQEDSDIAFLIDGSGSIIPHDFRRMKEFVSTVMEQLKKSKTLFSLMQYSEEFRIHFTFKEFQNNPNPRSLVKPITQLLGRTHTATGIRKVVRELFNITNGARKNAFKILVVITDGEKFGDPLGYEDVIPEADREGVIRYVIGVGDAFRSEKSRQELNTIASKPPRDHVFQVNNFEALKTIQNQLREKIFAIEGTQTGSSSSFEHEMSQEGFSAAITSNGPLLSTVGSYDWAGGVFLYTSKEKSTFINMTRVDSDMNDAYLGYAAAIILRNRVQSLVLGAPRYQHIGLVAMFRQNTGMWESNANVKGTQIGAYFGASLCSVDVDSNGSTDLVLIGAPHYYEQTRGGQVSVCPLPRGQRARWQCDAVLYGEQGQPWGRFGAALTVLGDVNGDKLTDVAIGAPGEEDNRGAVYLFHGTSGSGISPSHSQRIAGSKLSPRLQYFGQSLSGGQDLTMDGLVDLTVGAQGHVLLLRSQPVLRVKAIMEFNPREVARNVFECNDQVVKGKEAGEVRVCLHVQKSTRDRLREGQIQSVVTYDLALDSGRPHSRAVFNETKNSTRRQTQVLGLTQTCETLKLQLPNCIEDPVSPIVLRLNFSLVGTPLSAFGNLRPVLAEDAQRLFTALFPFEKNCGNDNICQDDLSITFSFMSLDCLVVGGPREFNVTVTVRNDGEDSYRTQVTFFFPLDLSYRKVSTLQNQRSQRSWRLACESASSTEVSGALKSTSCSINHPIFPENSEVTFNITFDVDSKASLGNKLLLKANVTSENNMPRTNKTEFQLELPVKYAVYMVVTSHGVSTKYLNFTASENTSRVMQHQYQVSNLGQRSLPISLVFLVPVRLNQTVIWDRPQVTFSENLSSTCHTKERLPSHSDFLAELRKAPVVNCSIAVCQRIQCDIPFFGIQEEFNATLKGNLSFDWYIKTSHNHLLIVSTAEILFNDSVFTLLPGQGAFVRSQTETKVEPFEVPNPLPLIVGSSVGGLLLLALITAALYKLGFFKRQYKDMMSEGGPPGAEPQ

SEQ ID NO: 2629 - protein, 21 aa, Homo sapiens
LGISLSGLLALPLHDFLCQLS

SEQ ID NO: 2630 - protein, 31 aa, Homo sapiens
KYTLWPCLVLALVPWAVHMFSAQEAPPIHSS

SEQ ID NO: 2631 - protein, 204 aa, Homo sapiens
ITGLFGAGLGGAWLALRAEKERLQQQKRTEALRQAAVGQGDFHLLDHRGRARCKADFRGQWVLMYFGFTHCPDICPDELEKLVQVVRQLEAEPGLPPVQPVFITVDPERDDVEAMARYVQDFHPRLLGLTGSTKQVAQASHSYRVYYNAGPKDEDQDYIVDHSIAIYLLNPDGLFTDYYGRSRSAEQISDSVRRHMAAFRSVLS

SEQ ID NO: 2632 - protein, 74 aa, Homo sapiens
MTQALVSTAWTSMWCWVGQVSASQTRSAGQAALGPNTESAKRRPCAGSSRSMMGSSFLANKFPFLSKRAIKSFQ

SEQ ID NO: 2633 - protein, 1031 aa, Homo sapiens
LGRKRTVLAQMAGISYVASFFLLLTKLSIGQREVTVQKGPLFRAEGYPVSIGCNVTGHQGPSEQHFQWSVYLPTNPTQEVQIISTKDAAFSYAVYTQRVRSGDVYVERVQGNSVLLHISKLQMKDAGEYECHTPNTDEKYYGSYSAKTNLIVIPDTLSATMSSQTLGKEEGEPLALTCEASKATAQHTHLSVTWYLTQDGGGSQATEIISLSKDFILVPGPLYTERFAASDVQLNKLGPTTFRLSIERLQSSDQGQLFCEATEWIQDPDETWMFITKKQTDQTTLRIQPAVKDFQVNITADSLFAEGKPLELVCLVVSSGRDPQLQGIWFFNGTEIAHIDAGGVLGLKNDYKERASQGELQVSKLGPKAFSLKIFSLGPEDEGAYRCVVAEVMKTRTGSWQVLQRKQSPDSHVHLRKPAARSVVMSTKNKQQVVWEGETLAFLCKAGGAESPLSVSWWHIPRDQTQPEFVAGMGQDGIVQLGASYGVPSYHGNTRLEKMDWATFQLEITFTAITDSGTYECRVSEKSRNQARDLSWTQKISVTVKSLESSLQVSLMSRQPQVMLTNTFDLSCVVRAGYSDLKVPLTVTWQFQPASSHIFHQLIRITHNGTIEWGNFLSRFQKKTKVSQSLFRSQLLVHDATEEETGVYQCEVEVYDRNSLYNNRPPRASAISHPLRIAVTLPESKLKVNSRSQVQELSINSNTDIECSILSRSNGNLQLAIIWYFSPVSTNASWLKILEMDQTNVIKTGDEFHTPQRKQKFHTEKVSQDLFQLHILNVEDSDRGKYHCAVEEWLLSTNGTWHKLGEKKSGLTELKLKPTGSKVRVSKVYWTENVTEHREVAIRCSLESVGSSATLYSVMWYWNRENSGSKLLVHLQHDGLLEYGEEGLRRHLHCYRSSSTDFVLKLHQVEMEDAGMYWCRVAEWQLHGHPSKWINQASDESQRMVLTVLPSEPTLPSRICSSAPLLYFLFICPFVLLLLLLISLLCLYWKARKLSTLRSNTRKEKALWVDLKEAGGVTTNRREDEEEDEGN

SEQ ID NO: 2634 - protein, 255 aa, Homo sapiens
IMWQLLLPTALLLLVSAGMRTEDLPKAVVFLEPQWYRVLEKDSVTLKCQGAYSPEDNSTQWFHNESLISSQASSYFIDAATVDDSGEYRCQTNLSTLSDPVQLEVHIGWLLLQAPRWVFKEEDPIHLRCHSWKNTALHKVTYLQNGKGRKYFHHNSDFYIPKATLKDSGSYFCRGLFGSKNVSSETVNITITQGLAVSTISSFFPPGYQVSFCLVMVLLFAVDTGLYFSVKTNIRSSTRDWKDHKFKWRKDPQDK

SEQ ID NO: 2635 - protein, 14 aa, Homo sapiens
LFLFGHLGTGLSLF

SEQ ID NO: 2636 - protein, 31 aa, Homo sapiens
ISLISGMFFCLMNAILNAVLERGVGVRVYSI

SEQ ID NO: 2637 - protein, 689 aa, Homo sapiens
LPLWLCLGFHFLTVGWRNRSGTATAASQGVCKLVGGAADCRGQSLASVPSSLPPHARMLTLDANPLKTLWNHSLQPYPLLESLSLHSCHLERISRGAFQEQGHLRSLVLGDNCLSENYEETAAALHALPGLRRLDLSGNALTEDMAALMLQNLSSLRSVSLAGNTIMRLDDSVFEGLERLRELDLQRNYIFEIEGGAFDGLAELRHLNLAFNNLPCIVDFGLTRLRVLNVSYNVLEWFLATGGEAAFELETLDLSHNQLLFFPLLPQYSKLRTLLLRDNNMGFYRDLYNTSSPREMVAQFLLVDGNVTNITTVSLWEEFSSSDLADLRFLDMSQNQFQYLPDGFLRKMPSLSHLNLHQNCLMTLHIREHEPPGALTELDLSHNQLSELHLAPGLASCLGSLRLFNLSSNQLLGVPPGLFANARNITTLDMSHNQISLCPLPAASDRVGPPSCVDFRNMASLRSLSLEGCGLGALPDCPFQGTSLTYLDLSSNWGVLNGSLAPLQDVAPMLQVLSLRNMGLHSSFMALDFSGFGNLRDLDLSGNCLTTFPRFGGSLALETLDLRRNSLTALPQKAVSEQLSRGLRTIYLSQNPYDCCGVDGWGALQHGQTVADWAMVTCNLSSKIIRVTELPGGVPRDCKWERLDLGLLYLVLILPSCLTLLVACTVIVLTFKKPLLQVIKSRCHWSSVY

SEQ ID NO: 2638 - protein, 270 aa, Homo sapiens
LVLILVVVLAVVVPRWRQQWSGPGTTKRFPETVLARCVKYTEIHPEMRHVDCQSVWDAFKGAFISKHPCNITEEDYQPLMKLGTQTVPCNKILLWSRIKDLAHQFTQVQRDMFTLEDTLLGYLADDLTWCGEFNTSKINYQSCPDWRKDCSNNPVSVFWKTVSRRFAEAACDVVHVMLNGSRSKIFDKNSTFGSVEVHNLQPEKVQTLEAWVIHGGREDSRDLCQDPTIKELESIISKRNIQFSCKNIYRPDKFLQCVKNPEDSSCTSEI

SEQ ID NO: 2639 - protein, 95 aa, Homo sapiens
RLGGWTILLTLTMGQGEPGGPQGDPWVPHELLLPSLCDSSHASSWGSGSITCAWRGGDSSSHPLVSGHILSNSPVAAVMCSSMGTHLSPFKGTLL

SEQ ID NO: 2640 - protein, 476 aa, Homo sapiens
KCCRLSVSLSLAALLEGAAASRTDQGQVALGGHYMAEGEGYFAMSEDELACSPYIPLGGDFGGGDFGGGDFGGGDFGGGGSFGGHCLDYCESPTAHCNVLNWEQVQRLDGILSETIPIHGRGNFPTLELQPSLIVKVVRRRLAEKRIGVRDVRLNGSAASHVLHQDSGLGYKDLDLIFCADLRGEGEFQTVKDVVLDCLLDFLPEGVNKEKITPLTLKEAYVQKMVKVCNDSDRWSLISLSNNSGKNVELKFVDSLRRQFEFSVDSFQIKLDSLLLFYECSENPMTETFHPTIIGESVYGDFQEAFDHLCNKIIATRNPEEIRGGGLLKYCNLLVRGFRPASDEIKTLQRYMCSRFFIDFSDIGEQQRKLESYLQNHFVGLEDRKYEYLMTLHGVVNESTVCLMGHERRQTLNLITMLAIRVLADQNVIPNVANVTCYYQPAPYVADANFSNYYIAQVQPVFTCQQQTYSTWLPCN

SEQ ID NO: 2641 - protein, 434 aa, Homo sapiens
KTPPGRTQTTMRAPGCGRLVLPLLLLAAAALAEGDAKGLKEGETPGNFMEDEQWLSSISQYSGKIKHWNRFRDEVEDDYIKSWEDNQQGDEALDTTKDPCQKVKCSRHKVCIAQGYQRAMCISRKKLEHRIKQPTVKLHGNKDSICKPCHMAQLASVCGSDGHTYSSVCKLEQQACLSSKQLAVRCEGPCPCPTEQAATSTADGKPETCTGQDLADLGDRLRDWFQLLHENSKQNGSASSVAGPASGLDKSLGASCKDSIGWMFSKLDTSADLFLDQTELAAINLDKYEVCIRPFFNSCDTYKDGRVSTAEWCFCFWREKPPCLAELERIQIQEAAKKKPGIFIPSCDEDGYYRKMQCDQSSGDCWCVDQLGLELTGTRTHGSPDCDDIVGFSGDFGSGVGWEDEEEKETEEAGEEAEEEEGEAGEADDGGYIW

SEQ ID NO: 2642 - protein, 73 aa, Homo sapiens
IGLALTVSALLFSSFLWFAIRCGCSLDRKGKYTLTPRMWPPAPGAQPLEMLPGWTHTLSPLRSSCYWSKRMLG

SEQ ID NO: 2643 - protein, 17 aa, Homo sapiens
LLCAGIVVMVLFSLFVD

SEQ ID NO: 2644 - protein, 38 aa, Homo sapiens
VGLFLLLLQPLTDPKLYGSLPLCVLLERAGDSEAPLCS

SEQ ID NO: 2645 - protein, 2208 aa, Homo sapiens
RRESRLPFLFTLVALLPPGALCEVWTQRLHGGSAPLPQDRGFLVVQGDPRELRLWARGDARGASRADEKPLRRKRSAALQPEPIKVYGQVSLNDSHNQMVVHWAGEKSNVIVALARDSLALARPKSSDVYVSYDYGKSFKKISDKLNFGLGNRSEAVIAQFYHSPADNKRYIFADAYAQYLWITFDFCNTLQGFSIPFRAADLLLHSKASNLLLGFDRSHPNKQLWKSDDFGQTWIMIQEHVKSFSWGIDPYDKPNTIYIERHEPSGYSTVFRSTDFFQSRENQEVILEEVRDFQLRDKYMFATKVVHLLGSEQQSSVQLWVSFGRKPMRAAQFVTRHPINEYYIADASEDQVFVCVSHSNNRTNLYISEAEGLKFSLSLENVLYYSPGGAGSDTLVRYFANEPFADFHRVEGLQGVYIATLINGSMNEENMRSVITFDKGGTWEFLQAPAFTGYGEKINCELSQGCSLHLAQRLSQLLNLQLRRMPILSKESAPGLIIATGSVGKNLASKTNVYISSSAGARWREALPGPHYYTWGDHGGIITAIAQGMETNELKYSTNEGETWKTFIFSEKPVFVYGLLTEPGEKSTVFTIFGSNKENVHSWLILQVNATDALGVPCTENDYKLWSPSDERGNECLLGHKTVFKRRTPHATCFNGEDFDRPVVVSNCSCTREDYECDFGFKMSEDLSLEVCVPDPEFSGKSYSPPVPCPVGSTYRRTRGYRKISGDTCSGGDVEARLEGELVPCPLAEENEFILYAVRKSIYRYDLASGATEQLPLTGLRAAVALDFDYEHNCLYWSDLALDVIQRLCLNGSTGQEVIINSGLETVEALAFEPLSQLLYWVDAGFKKIEVANPDGDFRLTIVNSSVLDRPRALVLVPQEGVMFWTDWGDLKPGIYRSNMDGSAAYHLVSEDVKWPNGISVDDQWIYWTDAYLECIERITFSGQQRSVILDNLPHPYAIAVFKNEIYWDDWSQLSIFRASKYSGSQMEILANQLTGLMDMKIFYKGKNTGSNACVPRPCSLLCLPKANNSRSCRCPEDVSSSVLPSGDLMCDCPQGYQLKNNTCVKQENTCLRNQYRCSNGNCINSIWWCDFDNDCGDMSDERNCPTTICDLDTQFRCQESGTCIPLSYKCDLEDDCGDNSDESHCEMHQCRSDEYNCSSGMCIRSSWVCDGDNDCRDWSDEANCTAIYHTCEASNFQCRNGHCIPQRWACDGDTDCQDGSDEDPVNCEKKCNGFRCPNGTCIPSSKHCDGLRDCSDGSDEQHCEPLCTHFMDFVCKNRQQCLFHSMVCDGIIQCRDGSDEDAAFAGCSQDPEFHKVCDEFGFQCQNGVCISLIWKCDGMDDCGDYSDEANCENPTEAPNCSRYFQFRCENGHCIPNRWKCDRENDCGDWSDEKDCGDSHILPFSTPGPSTCLPNYYRCSSGTCVMDTWVCDGYRDCADGSDEEACPLLANVTAASTPTQLGRCDRFEFECHQPKTCIPNWKRCDGHQDCQDGRDEANCPTHSTLTCMSREFQCEDGEACIVLSERCDGFLDCSDESDEKACSDELTVYKVQNLQWTADFSGDVTLTWMRPKKMPSASCVYNVYYRVVGESIWKTLETHSNKTNTVLKVLKPDTTYQVKVQVQCLSKAHNTNDFVTLRTPEGLPDAPRNLQLSLPREAEGVIVGHWAPPIHTHGLIREYIVEYSRSGSKMWASQRAASNFTEIKNLLVNTLYTVRVAAVTSRGIGNWSDSKSITTIKGKVIPPPDIHIDSYGENYLSFTLTMESDIKVNGYVVNLFWAFDTHKQERRTLNFRGSILSHKVGNLTAHTSYEISAWAKTDLGDSPLAFEHVMTRGVRPPAPSLKAKAINQTAVECTWTGPRNVVYGIFYATSFLDLYRNPKSLTTSLHNKTVIVSKDEQYLFLVRVVVPYQGPSSDYVVVKMIPDSRLPPRHLHVVHTGKTSVVIKWESPYDSPDQDLLYAVAVKDLIRKTDRSYKVKSRNSTVEYTLNKLEPGGKYHIIVQLGNMSKDSSIKITTVSLSAPDALKIITENDHVLLFWKSLALKEKHFNESRGYEIHMFDSAMNITAYLGNTTDNFFKISNLKMGHNYTFTVQARCLFGNQICGEPAILLYDELGSGADASATQAARSTDVAAVVVPILFLILLSLGVGFAILYTKHRRLQSSFTAFANSHYSSRLGSAIFSSGDDLGEDDEDAPMITGFSDDVPMVIA

SEQ ID NO: 2646 - protein, 185 aa, Homo sapiens
TLKMKGWGWLALLLGALLGTAWARRSQDLHCGACRALVDELEWEIAQVDPKKTIQMGSFRINPDGSQSVVEVPYARSEAHLTELLEEICDRMKEYGEQIDPSTHRKNYVRVVGRNGESSELDLQGIRIDSDISGTLKFACESIVEEYEDELIEFFSREADNVKDKLCSKRTDLCDHALHISHDEL

SEQ ID NO: 2647 - protein, 38 aa, Homo sapiens
LLLLLTFLAKQHTDSFQAALGSLPVDKAQELQAVLGLS

SEQ ID NO: 2648 - protein, 268 aa, Homo sapiens
VFESIGKFGLALAVAGGVVNSALYNVDAGHRAVIFDRFRGVQDIVVGEGTHFLIPWVQKPIIFDCRSRPRNVPVITGSKDLQNVNITLRILFRPVASQLPRIFTSIGEDYDERVLPSITTEILKSVVARFDAGELITQRELVSRQVSDDLTERAATFGLILDDVSLTHLTFGKEFTEAVEAKQVAQQEAERARFVVEKAEQQKKAAIISAEGDSKAAELIANSLATAGDGLIELRKLEAAEDIAYQLSRSRNITYLPAGQSVLLQLPQ

SEQ ID NO: 2649 - protein, 96 aa, Homo sapiens
MPARRLLLLLTLLLPGLGIFGSTSTVTLPETLLFVSTLDGSLHAVSKRTGSIKWTLKEGNLDLVLGRHGHLLNWFHRNIFWRKRKHYSLSNKINKK

SEQ ID NO: 2650 - protein, 20 aa, Homo sapiens
IPAISAVAVALMYRLYMAED

SEQ ID NO: 2651 - protein, 902 aa, Homo sapiens
VLAQGLLSMALLALCWERSLAGAEETIPLQTLRCYNDYTSHITCRWADTQDAQRLVNVTLIRRVNEDLLEPVSCDLSDDMPWSACPHPRCVPRRCVIPCQSFVVTDVDYFSFQPDRPLGTRLTVTLTQHVQPPEPRDLQISTDQDHFLLTWSVALGSPQSHWLSPGDLEFEVVYKRLQDSWEDAAILLSNTSQATLGPEHLMPSSTYVARVRTRLAPGSRLSGRPSKWSPEVCWDSQPGDEAQPQNLECFFDGAAVLSCSWEVRKEVASSVSFGLFYKPSPDAGSAVLLREEECSPVLREGLGSLHTRHHCQIPVPDPATHGQYIVSVQPRRAEKHIKSSVNIQMAPPSLNVTKDGDSYSLRWETMKMRYEHIDHTFEIQYRKDTATWKDSKTETLQNAHSMALPALEPSTRYWARVRVRTSRTGYNGIWSEWSEARSWDTESVLPMWVLALIVIFLTIAVLLALRFCGIYGYRLRRKWEEKIPNPSKSHLFQNGSAELWPPGSMSAFTSGSPPHQGPWGSRFPELEGVFPVGFGDSEVSPLTIEDPKHVCDPPSGPDTTPAASDLPTEQPPSPQPGPPAASHTPEKQASSFDFNGPYLGPPHSRSLPDILGQPEPPQEGGSQKSPPPGSLEYLCLPAGGQVQLVPLAQAMGPGQAVEVERRPSQGAAGSPSLESGGGPAPPALGPRVGGQDQKDSPVAIPMSSGDTEDPGVASGYVSSADLVFTPNSGASSVSLVPSLGLPSDQTPSLCPGLASGPPGAPGPVKSGFEGYVELPPIEGRSPRSPRNNPVPPEAKSPVLNPGERPADVSPTSPQPEGLLVLQQVGDYCFLPGLGPGPLSLRSKPSSPGPGPEIKNLDQAFQVKKPPGQAVPQVPVIQLFKALKQQDYLSLPPWEVNKPGEVC

SEQ ID NO: 2652 - protein, 43 aa, Homo sapiens
LPPLALLLLLAALVAPATAATAYRPDWNRLSGLTRARVETCGG

SEQ ID NO: 2653 - protein, 19 aa, Homo sapiens
MITKVVFPEQGLAILLWMC

SEQ ID NO: 2654 - protein, 166 aa, Homo sapiens
MQRLGATLLCLLLAAAVPTAPAPAPTATSAPVKPGPALSYPQEEATLNEMFREVEELMEDTQHKLRSAVEEMEAEEAAAKASSEVNLANLPPSYHNETNTDTKVGNNTIHVHREIHKVSHGQHFLLSIASSPIRELRFFCFCFFICDIQAQTTIENHKIRIENQKE

SEQ ID NO: 2655 - protein, 1044 aa, Homo sapiens
MYLTGLCFLLGPTQLTQRLPVSRQECPRQEQDIVFLIDGSGSISSRNFATMMNFVRAVISQFQRPSTQFSLMQFSNKFQTHFTFEEFRRSSNPLSLLASVHQLQGFTYTATAIQNVVHRLFHASYGARRDAAKILIVITDGKKEGDSLDYKDVIPMADAAGIIRYAIGVGLAFQNRNSWKELNDIASKPSQEHIFKVEDFDALKDIQNQLKEKIFAIEGTETTSSSSFELEMAQEGFSAVFTPDGPVLGAVGSFTWSGGAFLYPPNMSPTFINMSQENVDMRDSYLGYSTELALWKGVQSLVLGAPRYQHTGKAVIFTQVSRQWRMKAEVTGTQIGSYFGASLCSVDVDSDGSTDLVLIGAPHYYEQTRGGQVSVCPLPRGWRRWWCDAVLYGEQGHPWGRFGAALTVLGDVNGDKLTDVVIGAPGEEENRGAVYLFHGVLGPSISPSHSQRIAGSQLSSRLQYFGQALSGGQDLTQDGLVDLAVGARGQVLLLRTRPVLWVGVSMQFIPAEIPRSAFECREQVVSEQTLVQSNICLYIDKRSKNLLGSRDLQSSVTLDLALDPGRLSPRATFQETKNRSLSRVRVLGLKAHCENFNLLLPSCVEDSVTPITLRLNFTLVGKPLLAFRNLRPMLAADAQRYFTASLPFEKNCGADHICQDNLGISFSFPGLKSLLVGSNLELNAEVMVWNDGEDSYGTTITFSHPAGLSYRYVAEGQKQGQLRSLHLTCDSAPVGSQGTWSTSCRINHLIFRGGAQITFLATFDVSPKAVLGDRLLLTANVSSENNTPRTSKTTFQLELPVKYAVYTVVSSHEQFTKYLNFSESEEKESHVAMHRYQVNNLGQRDLPVSINFWVPVELNQEAVWMDVEVSHPQNPSLRCSSEKIAPPASDFLAHIQKNPVLDCSIAGCLRFRCDVPSFSVQEELDFTLKGNLSFGWVRQILQKKVSVVSVAEITFDTSVYSQLPGQEAFMRAQTTTVLEKYKVHNPTPLIVGSSIGGLLLLALITAVLYKVGFFKRQYKEMMEEANGQIAPENGTQTPSPPSEK

SEQ ID NO: 2656 - protein, 1050 aa, Homo sapiens
MYLTGLCFLLGPTQLTQRLPVSRQECPRQEQDIVFLIDGSGSISSRNFATMMNFVRAVISQFQRPSTQFSLMQFSNKFQTHFTFEEFRRSSNPLSLLASVHQLQGFTYTATAIQNVVHRLFHASYGARRDAAKILIVITDGKKEGDSLDYKDVIPMADAAGIIRYAIGVGLAFQNRNSWKELNDIASKPSQEHIFKVEDFDALKDIQNQLKEKIFAIEGTETTSSSSFELEMAQEGFSAVFTPDGPVLGAVGSFTWSGGAFLYPPNMSPTFINMSQENVDMRDSYLGYSTELALWKGVQSLVLGAPRYQHTGKAVIFTQVSRQWRMKAEVTGTQIGSYFGASLCSVDVDSDGSTDLVLIGAPHYYEQTRGGQVSVCPLPRGWRRWWCDAVLYGEQGHPWGRFGAALTVLGDVNGDKLTDVVIGAPGEEENRGAVYLFHGVLGPSISPSHSQRIAGSQLSSRLQYFGQALSGGQDLTQDGLVDLAVGARGQVLLLRTRPVLWVGVSMQFIPAEIPRSAFECREQVVSEQTLVQSNICLYIDKRSKNLLGSRDLQSSVTLDLALDPGRLSPRATFQETKNRSLSRVRVLGLKAHCENFNLLLPSCVEDSVTPITLRLNFTLVGKPLLAFRNLRPMLAADAQRYFTASLPFEKNCGADHICQDNLGISFSFPGLKSLLVGSNLELNAEVMVWNDGEDSYGTTITFSHPAGLSYRYVAEGQKQGQLRSLHLTCDSAPVGSQGTWSTSCRINHLIFRGGAQITFLATFDVSPKAVLGDRLLLTANVSSENNTPRTSKTTFQLELPVKYAVYTVVSSHEQFTKYLNFSESEEKESHVAMHRYQVNNLGQRDLPVSINFWVPVELNQEAVWMDVEVSHPQNPSLRCSSEKIAPPASDFLAHIQKNPVLDCSIAGCLRFRCDVPSFSVQEELDFTLKGNLSFGWVRQILQKKVSVVSVAEITFDTSVYSQLPGQEAFMRAQTTTVLEKYKVHNPTPLIVGSSIGGLLLLALITAVLYKVGFFKRQYKEMMEEANGQIAPENGTQTPSPPTPHYPQDNV

SEQ ID NO: 2657 - protein, 67 aa, Homo sapiens
MIQSPEAAGQEAVLLVLPLVVGLLNLGAPYLCRVLAALEPHDSPVLEVYVAICRCVAAHENIIWCWS

SEQ ID NO: 2658 - protein, 59 aa, Homo sapiens
TPRMHRLWIGPAFFLMTSLSVSGAVIPRNGGPGGVSSGPCLLQLLCGQAGSSTIRKIPS

SEQ ID NO: 2659 - protein, 1027 aa, Homo sapiens
RAARALLPLLLQACWTAAQDEPETPRAVAFQDCPVDLFFVLDTSESVALRLKPYGALVDKVKSFTKRFIDNLRDRYYRCDRNLVWNAGALHYSDEVEIIQGLTRMPGGRDALKSSVDAVKYFGKGTYTDCAIKKGLEQLLVGGSHLKENKYLIVVTDGHPLEGYKEPCGGLEDAVNEAKHLGVKVFSVAITPDHLEPRLSIIATDHTYRRNFTAADWGQSRDAEEAISQTIDTIVDMIKNNVEQVCCSFECQPARGPPGLRGDPGFEGERGKPGLPGEKGEAGDPGRPGDLGPVGYQGMKGEKGSRGEKGSRGPKGYKGEKGKRGIDGVDGVKGEMGYPGLPGCKGSPGFDGIQGPPGPKGDPGAFGLKGEKGEPGADGEAGRPGSSGPSGDEGQPGEPGPPGEKGEAGDEGNPGPDGAPGERGGPGERGPRGTPGTRGPRGDPGEAGPQGDQGREGPVGVPGDPGEAGPIGPKGYRGDEGPPGSEGARGAPGPAGPPGDPGLMGERGEDGPAGNGTEGFPGFPGYPGNRGAPGINGTKGYPGLKGDEGEAGDPGDDNNDIAPRGVKGAKGYRGPEGPQGPPGHQGPPGPDECEILDIIMKMCSCCECKCGPIDLLFVLDSSESIGLQNFEIAKDFVVKVIDRLSRDELVKFEPGQSYAGVVQYSHSQMQEHVSLRSPSIRNVQELKEAIKSLQWMAGGTFTGEALQYTRDQLLPPSPNNRIALVITDGRSDTQRDTTPLNVLCSPGIQVVSVGIKDVFDFIPGSDQLNVISCQGLAPSQGRPGLSLVKENYAELLEDAFLKNVTAQICIDKKCPDYTCPITFSSPADITILLDGSASVGSHNFDTTKRFAKRLAERFLTAGRTDPAHDVRVAVVQYSGTGQQRPERASLQFLQNYTALASAVDAMDFINDATDVNDALGYVTRFYREASSGAAKKRLLLFSDGNSQGATPAAIEKAVQEAQRAGIEIFVVVVGRQVNEPHIRVLVTGKTAEYDVAYGESHLFRVPSYQALLRGVFHQTVSRKVALG

SEQ ID NO: 2660 - protein, 14 aa, Homo sapiens
MLLMLIVIGVFASN

SEQ ID NO: 2661 - protein, 1034 aa, Homo sapiens
LQRPWRVPWLPWTILLVSTAAASQNQERLCAFKDPYQQDLGIGESRISHENGTILCSKGSTCYGLWEKSKGDINLVKQGCWSHIGDPQECHYEECVVTTTPPSIQNGTYRFCCCSTDLCNVNFTENFPPPDTTPLSPPHSFNRDETIIIALASVSVLAVLIVALCFGYRMLTGDRKQGLHSMNMMEAAASEPSLDLDNLKLLELIGRGRYGAVYKGSLDERPVAVKVFSFANRQNFINEKNIYRVPLMEHDNIARFIVGDERVTADGRMEYLLVMEYYPNGSLCKYLSLHTSDWVSSCRLAHSVTRGLAYLHTELPRGDHYKPAISHRDLNSRNVLVKNDGTCVISDFGLSMRLTGNRLVRPGEEDNAAISEVGTIRYMAPEVLEGAVNLRDCESALKQVDMYALGLIYWEIFMRCTDLFPGESVPEYQMAFQTEVGNHPTFEDMQVLVSREKQRPKFPEAWKENSLAVRSLKETIEDCWDQDAEARLTAQCAEERMAELMMIWERNKSVSPTVNPMSTAMQNERNLSHNRRVPKIGPYPDYSSSSYIEDSIHHTDSIVKNISSEHSMSSTPLTIGEKNRNSINYERQQAQARIPSPETSVTSLSTNTTTTNTTGLTPSTGMTTISEMPYPDETNLHTTNVAQSIGPTPVCLQLTEEDLETNKLDPKEVDKNLKESSDENLMEHSLKQFSGPDPLSSTSSSLLYPLIKLAVEATGQQDFTQTANGQACLIPDVLPTQIYPLPKQQNLPKRPTSLPLNTKNSTKEPRLKFGSKHKSNLKQVETGVAKMNTINAAEPHVVTVTMNGVAGRNHSVNSHAATTQYANGTVLSGQTTNIVTHRAQEMLQNQFIGEDTRLNINSSPDEHEPLLRREQQAGHDEGVLDRLVDRRERPLEGGRTNSNNNNSNPCSEQDVLAQGVPSTAADPGPSKPRRAQRPNSLDLSATNVLDGSSIQIGESTQDGKSGSGEKIKKRVKTPYSLKRWRPSTWVISTESLDCEVNNNGSNRAVHSKSSTAVYLAEGGTATTMVSKDIGMNCL

SEQ ID NO: 2662 - protein, 35 aa, Homo sapiens
VCVLISLISGMFFCLMNAILNAVLERGVGVRVYSI

SEQ ID NO: 2663 - protein, 700 aa, Homo sapiens
LREPAALEMELLPLWLCLGFHFLTVGWRNRSGTATAASQGVCKLVGGAADCRGQSLASVPSSLPPHARMLTLDANPLKTLWNHSLQPYPLLESLSLHSCHLERISRGAFQEQGHLRSLVLGDNCLSENYEETAAALHALPGLRRLDLSGNALTEDMAALMLQNLSSLRSVSLAGNTIMRLDDSVFEGLERLRELDLQRNYIFEIEGGAFDGLAELRHLNLAFNNLPCIVDFGLTRLRVLNVSYNVLEWFLATGGEAAFELETLDLSHNQLLFFPLLPQYSKLRTLLLRDNNMGFYRDLYNTSSPREMVAQFLLVDGNVTNITTVSLWEEFSSSDLADLRFLDMSQNQFQYLPDGFLRKMPSLSHLNLHQNCLMTLHIREHEPPGALTELDLSHNQLSELHLAPGLASCLGSLRLFNLSSNQLLGVPPGLFANARNITTLDMSHNQISLCPLPAASDRVGPPSCVDFRNMASLRSLSLEGCGLGALPDCPFQGTSLTYLDLSSNWGVLNGSLAPLQDVAPMLQVLSLRNMGLHSSFMALDFSGFGNLRDLDLSGNCLTTFPRFGGSLALETLDLRRNSLTALPQKAVSEQLSRGLRTIYLSQNPYDCCGVDGWGALQHGQTVADWAMVTCNLSSKIIRVTELPGGVPRDCKWERLDLGLLYLVLILPSCLTLLVACTVIVLTFKKPLLQVIKSRCHWSSVY

SEQ ID NO: 2664 - protein, 537 aa, Homo sapiens
VTMKLWVSALLMAWFGVLSCVQAEFFTSIGHMTDLIYAEKELVQSLKEYILVEEAKLSKIKSWANKMEALTSKSAADAEGYLAHPVNAYKLVKRLNTDWPALEDLVLQDSAAGFIANLSVQRQFFPTDEDEIGAAKALMRLQDTYRLDPGTISRGELPGTKYQAMLSVDDCFGMGRSAYNEGDYYHTVLWMEQVLKQLDAGEEATTTKSQVLDYLSYAVFQLGDLHRALELTRRLLSLDPSHERAGGNLRYFEQLLEEEREKTLTNQTEAELATPEGIYERPVDYLPERDVYESLCRGEGVKLTPRRQKRLFCRYHHGNRAPQLLIAPFKEEDEWDSPHIVRYYDVMSDEEIERIKEIAKPKLARATVRDPKTGVLTVASYRVSKSSWLEEDDDPVVARVNRRMQHITGLTVKTAELLQVANYGVGGQYEPHFDFSRNDERDTFKHLGTGNRVATFLNYMSDVEAGGATVFPDLGAAIWPKKGTAVFWYNLLRSGEGDYRTRHAACPVLVGCKWVSNKWFHERGQEFLRPCGSTEVD

SEQ ID NO: 2665 - protein, 130 aa, Homo sapiens
KALRIPGDLRVATVTLMLAMLSSLLAEGRDSPVEPTVTISPSRTEALNHHNLLVCSVTDFYPGQIKVRWFRNDQEETAGVVSTPLIRNGDWTFQILVMLEMTPQRGDVYTCHVEHPSLQSPITVEWRLLH

SEQ ID NO: 2666 - protein, 63 aa, Homo sapiens
RKSILLLLPFTTTYLCELGFSILTRLKTKKRNRLNSAPDMRVALSSCVPDWKELMNRQAHPSH

SEQ ID NO: 2667 - protein, 445 aa, Homo sapiens
LLLFVGLLLTWESGQVLGDQTVSDNELQEMSNQGSKYVNKEIQNAVNGVKQIKTLIEKTNEERKTLLSNLEEAKKKKEDALNETRESETKLKELPGVCNETMMALWEECKPCLKQTCMKFYARVCRSGSGLVGRQLEEFLNQSSPFYFWMNGDRIDSLLENDRQQTHMLDVMQDHFSRASSIIDELFQDRFFTREPQDTYHYLPFSLPHRRPHFFFPKSRIVRSLMPFSPYEPLNFHAMFQPFLEMIHEAQQAMDIHFHSPAFQHPPTEFIREGDDDRTVCREIRHNSTGCLRMKDQCDKCREILSVDCSTNNPSQAKLRRELDESLQVAERLTRKYNELLKSYQWKMLNTSSLLEQLNEQFNWVSRLANLTQGEDQYYLRVTTVASHTSDSDVPSGVTEVVVKLFDSDPITVTVPVEVSRKNPKFMETVAEKALQEYRKKHREE

SEQ ID NO: 2668 - protein, 291 aa, Homo sapiens
KMRIFAVFIFMTYWHLLNAFTVTVPKDLYVVEYGSNMTIECKFPVEKQLDLAALIVYWEMEDKNIIQFVHGEEDLKVQHSSYRQRARLLKDQLSLGNAALQITDVKLQDAGVYRCMISYGGADYKRITVKVNAPYNKINQRILVVDPVTSEHELTCQAEGYPKAEVIWTSSDHQVLSGKTTTTNSKREEKLFNVTSTLRINTTTNEIFYCTFRRLDPEENHTAELVIPELPLAHPPNERTHLVILGAILLCLGVALTFIFRLRKGRMMDVKKCGIQDTNSKKQSDTHLEET

SEQ ID NO: 2669 - protein, 43 aa, Homo sapiens
LLLFVYFLLLPRRRRRHHEGNRALAGRAVRQPNRRQVLGGDQR

SEQ ID NO: 2670 - protein, 688 aa, Homo sapiens
IWLGMWVLLRSGYPLRILLPLRGEWMGRRGLPRNLAPGPPRRRYRKETLQALDMPVLPVTATEIRQYLRGHGIPFQDGHSCLRALSPFAESSQLKGQTGVTTSFSLFIDKTTGHFLCMTSLAEGSWEDFQASVEGRGDGAREGFLLSKAPEFEDSEEVRRIWNRAIPLWELPDQEEVQLADTMFGLTKVTDDTLKRFSVRYLRPARSLVFPWFSPGGSGLRGLKLLEAKCQGDGVSYEETTIPRPSAYHNLFGLPLISRRDAEVVLTSRELDSLALNQSTGLPTLTLPRGTTCLPPALLPYLEQFRRIVFWLGDDLRSWEAAKLFARKLNPKRCFLVRPGDQQPRPLEALNGGFNLSRILRTALPAWHKSIVSFRQLREEVLGELSNVEQAAGLRWSRFPDLNRILKGHRKGELTVFTGPTGSGKTTFISEYALDLCSQGVNTLWGSFEISNVRLARVMLTQFAEGRLEDQLDKYDHWADRFEDLPLYFMTFHGQQSIRTVIDTMQHAVYVYDICHVIIDNLQFMMGHEQLSTDRIAAQDYIIGVFRKFATDNNCHVTLVIHPRKEDDDKELQTASIFGSAKASQEADNVLILQDRKLVTGPGKRYLQVSKNRFDGDVGVFPLEFNKNSLTFSIPPKNKARLKKIKDDTGPVAKKPSSGKKGATTQNSEICSGQAPTPDQPDTSKRSK

SEQ ID NO: 2671 - protein, 39 aa, Homo sapiens
IFFSWCVWWLFLSVEGKRRYHPRLSPTPLQNGFSDTPAV

SEQ ID NO: 2672 - protein, 102 aa, Homo sapiens
LSLLLAVTGGAAALSALSPPGENEPQCPPARSQPCPGQRKTTRIPGSGRRPGWAAPVRAGDSAPPLAAVSGNWVPALRGFQRTGTPFPGSPAHPAGEGGRCR

SEQ ID NO: 2673 - protein, 564 aa, Homo sapiens
KSFEKIGVLFVTLRELLYVVQTPCSWHCSFLWRRTTNSGEFTVSLSDVLLTWKYLLHEKLNLPVENMDVTDHYEDVRKIYDDFLKNSNMLDLIDVYQKCRALTSNCENYNTVSPSQLLDFLSGKQYAVGDETDLSIPTSPTSKYNRDNEKVQLLARKIIFSYLNLLVNSKNDLAVAYILNIPDRGLGREAFTDLKHAAREKQMSIFLVATSFIRTIELGGKGYAPPPSDPLRTHVKGLSNFINFIDKLDEILGEIPNPSIAGGQILSVIKMQLIKGQNSRDPFCKAIEEVAQDLDLRIKNIINSQEGVVALSTTDISPARPKSHAINHGTAYCGRDTVKALLVLLDEEAANAPTKNKAELLYDEENTIHHHGTSILTLFRSPTQVNNSIKPLRERICVSMQEKKIKMKQTLIRSQFACTYKDDYMISKDNWNNVNLASKPLCVLYMENDLSEGVNPSVGRSTIGTSFGNVHLDRSKNEKVSRKSTSQTGNKSSKRKQVDLDGENILCDNRNEPPQHKNAKIPKKSNDSQNRLYGKLAKVAKSNKCTAKDKLISGQAKLTQFFRL

SEQ ID NO: 2674 - protein, 490 aa, Homo sapiens
LCAVLGAVMIVMVPSLIKQQVLKNVRIDPSSLSFNMWKEIPIPFYLSVYFFDVMNPSEILKGEKPQVRERGPYVYREFRHKSNITFNNNDTVSFLEYRTFQFQPSKSHGSESDYIVMPNILVLGAAVMMENKPMTLKLIMTLAFTTLGERAFMNRTVGEIMWGYKDPLVNLINKYFPGMFPFKDKFGLFAELNNSDSGLFTVFTGVQNISRIHLVDKWNGLSKVDFWHSDQCNMINGTSGQMWPPFMTPESSLEFYSPEACRSMKLMYKESGVFEGIPTYRFVAPKTLFANGSIYPPNEGFCPCLESGIQNVSTCRFSAPLFLSHPHFLNADPVLAEAVTGLHPNQEAHSLFLDIHPVTGIPMNCSVKLQLSLYMKSVAGIGQTGKIEPVVLPLLWFAESGAMEGETLHTFYTQLVLMPKVMHYAQYVLLALGCVLLLVPVICQIRSQEKCYLFWSSSKKGSKDKEAIQAYSESLMTSAPKGSVLQEAKL

SEQ ID NO: 2675 - protein, 70 aa, Homo sapiens
TEARLVFLQKFPPWAVVEVVTVIVAAPAAATATTRDGGGCSRNCNIPEVFPELLGCPNRRGPPGGVRGAD

SEQ ID NO: 2676 - protein, 220 aa, Homo sapiens
LLLLLLLAAACAVFLACPWAVSGARASPGSAASPRLREGPELSPDDPAGLLDLRQGMFAQLVAQNVLLIDGPLSWYSDPGLAGVSLTGGLSYKEDTKELVVAKAGVYYVFFQLELRRVVAGEGSGSVSLALHLQPLRSAAGAAALALTVDLPPASSEARNSAFGFQGRLLHLSAGQRLGVHLHTEARARHAWQLTQGATVLGLFRVTPEIPAGLPSPRSE

SEQ ID NO: 2677 - protein, 692 aa, Homo sapiens
KRTRAGGRMGLSAAAPLWGPPGLLLAIALHPALSVPPRRDYCVLGAGPAGLQMAYFLQRAGRDYAVFERAPRPGSFFTRYPRHRKLISINKRYTGKANAEFNLRHDWNSLLSHDPRLLFRHYSRAYFPDARDMVRYLGDFADTLGLRVQYNTTIAHVTLDKDRQAWNGHYFILTDQKGQVHQCSVLFVATGLSVPNQVDFPGSEYAEGYESVSVDPEDFVGQNVLILGRGNSAFETAENILGVTNFIHMLSRSRVRLSWATHYVGDLRAINNGLLDTYQLKSLDGLLESDLTDLAILKDSKGKFHVTPKFFLEEANTNQSADSITLPQDDNDNFAMRVPYDRVIRCLGWNFDFSIFNKSLRLNSGNAFGKKYPLIRASYESKGSRGLFILGTASHSVDYRKSAGGFIHGFRYTVRAVHRLLEHRHHSVTWPATELPITQLTSSIVRRVNEASGLYQMFGVLADVILLKENSTAFEYLEEFPIQMLAQLETLTGRKAKHGLFVINMEYGRNFSGPDKDVFFDDRSVGHTEDAWQSNFLHPVIYYYRYLPTEQEVRFRPAHWPLPRPTAIHHIVEDFLTDWTAPIGHILPLRRFLENCLDTDLRSFYAESCFLFALTRQKLPPFCQQGYLRMQGLVSTESLWQHRVESRLLRDYAPTGRRLEDSSQQLGDQEPLGSPLAPGPLAQSVDSNKEEL

SEQ ID NO: 2678 - protein, 966 aa, Homo sapiens
LLGVFLALVAPGVLGISCGSPPPILNGRISYYSTPIAVGTVIRYSCSGTFRLIGEKSLLCITKDKVDGTWDKPAPKCEYFNKYSSCPEPIVPGGYKIRGSTPYRHGDSVTFACKTNFSMNGNKSVWCQANNMWGPTRLPTCVSVFPLECPALPMIHNGHHTSENVGSIAPGLSVTYSCESGYLLVGEKIINCLSSGKWSAVPPTCEEARCKSLGRFPNGKVKEPPILRVGVTANFFCDEGYRLQGPPSSRCVIAGQGVAWTKMPVCEEIFCPSPPPILNGRHIGNSLANVSYGSIVTYTCDPDPEEGVNFILIGESTLRCTVDSQKTGTWSGPAPRCELSTSAVQCPHPQILRGRMVSGQKDRYTYNDTVIFACMFGFTLKGSKQIRCNAQGTWEPSAPVCEKECQAPPNILNGQKEDRHMVRFDPGTSIKYSCNPGYVLVGEESIQCTSEGVWTPPVPQCKVAACEATGRQLLTKPQHQFVRPDVNSSCGEGYKLSGSVYQECQGTIPWFMEIRLCKEITCPPPPVIYNGAHTGSSLEDFPYGTTVTYTCNPGPERGVEFSLIGESTIRCTSNDQERGTWSGPAPLCKLSLLAVQCSHVHIANGYKISGKEAPYFYNDTVTFKCYSGFTLKGSSQIRCKADNTWDPEIPVCEKETCQHVRQSLQELPAGSRVELVNTSCQDGYQLTGHAYQMCQDAENGIWFKKIPLCKVIHCHPPPVIVNGKHTGMMAENFLYGNEVSYECDQGFYLLGEKKLQCRSDSKGHGSWSGPSPQCLRSPPVTRCPNPEVKHGYKLNKTHSAYSHNDIVYVDCNPGFIMNGSRVIRCHTDNTWVPGVPTCIKKEVNCSSPADMDGIQKGLEPRKMYQYGAVVTLECEDGYMLEGSPQSQCQSDHQWNPPLAVCRSRSLAPVLCGIAAGLILLTFLIVITLYVISKHRARNYYTDTSQKEAFHLEAREVYSVDPYNPAS

SEQ ID NO: 2679 - protein, 61 aa, Homo sapiens
TSTALLFLLFFLTLRFSVVKRGRKKLLYIFKQPFMRPVQTTQEEDGCSCRFPEEEEGGCEL

SEQ ID NO: 2680 - protein, 30 aa, Homo sapiens
RGKLEGVVLLSQLSCLSAMFSGRVWLGLPP

SEQ ID NO: 2681 - protein, 13 aa, Homo sapiens
KYQIIIMLYLNYL

SEQ ID NO: 2682 - protein, 141 aa, Homo sapiens
IQHIKQDFYKLGIFLILCFQRMQGVVNRLSKLLKPGGMLLFRDYGRYDKTQLRFKKGHCLSENFYVRGDGTRAYFFTKGEVHSMFCKASLDEKQNLVDRRLQVNRKKQVKMHRVWIQGKFQKPLHQTQNSSNMVSTLLSQD

SEQ ID NO: 2683 - protein, 183 aa, Homo sapiens
LQFRGSMLALAMVSLEMEKLIPDWLSLTIELLQKAQMDSSQLIHCRELVAHHLSTLQSSLPLNSVYVYRPLKHTLVTCDKGVFRLHPSSVPGPDFSKDNSKPEVPVRGTAAFYHHLPAASGCKQTSTKRKVEEMEVDDFYDGIKRLYNEDNVSENVGSVCGTDLSRQEGHASPCPPLQPVSVM

SEQ ID NO: 2684 - protein, 160 aa, Homo sapiens
KMKNHLLFWGVLAVFIKAVHVKAQEDERIVLVDNKCKCARITSRIIRSSEDPNEDIVERNIRIIVPLNNRENISDPTSPLRTRFVYHLSDLCKKCDPTEVELDNQIVTATQSNICDEDSATETCYTYDRNKCYTAVVPLVYGGETKMVETALTPDACYPD

SEQ ID NO: 2685 - protein, 49 aa, Homo sapiens
MTPPERLFLPRVCGTTLHLLLLGLLLVLLPGAQVRQQENGGCWGGSAKP

SEQ ID NO: 2686 - protein, 17 aa, Homo sapiens
LGLALGAVFSFLFRAIV

SEQ ID NO: 2687 - protein, 265 aa, Homo sapiens
KALRIPGDLRVATVTLMLAMLSSLLAEGRDSPEDFVFQFKGMCYFTNGTERVRLVTRYIYNREEYARFDSDVGVYRAVTPQGRPDAEYWNSQKEVLEGTRAELDTVCRHNYEVAFRGILQRRVEPTVTISPSRTEALNHHNLLVCSVTDFYPGQIKVRWFRNDQEETAGVVSTPLIRNGDWTFQILVMLEMTPQRGDVYTCHVEHPSLQSPITVEWRAQSESAQSKMLSGVGGFVLGLIFLGLGLIIRQRSQKGPQGPPPAGLLH

SEQ ID NO: 2688 - protein, 726 aa, Homo sapiens
VTKLLPALLLQHVLLHLLLLPIAIPYAEGQRKRRNTIHEFKKSAKTTLIKIDPALKIKTKKVNTADQCANRCTRNKGLPFTCKAFVFDKARKQCLWFPFNSMSSGVKKEFGHEFDLYENKDYIRNCIIGKGRSYKGTVSITKSGIKCQPWSSMIPHEHSFLPSSYRGKDLQENYCRNPRGEEGGPWCFTSNPEVRYEVCDIPQCSEVECMTCNGESYRGLMDHTESGKICQRWDHQTPHRHKFLPERYPDKGFDDNYCRNPDGQPRPWCYTLDPHTRWEYCAIKTCADNTMNDTDVPLETTECIQGQGEGYRGTVNTIWNGIPCQRWDSQYPHEHDMTPENFKCKDLRENYCRNPDGSESPWCFTTDPNIRVGYCSQIPNCDMSHGQDCYRGNGKNYMGNLSQTRSGLTCSMWDKNMEDLHRHIFWEPDASKLNENYCRNPDDDAHGPWCYTGNPLIPWDYCPISRCEGDTTPTIVNLDHPVISCAKTKQLRVVNGIPTRTNIGWMVSLRYRNKHICGGSLIKESWVLTARQCFPSRDLKDYEAWLGIHDVHGRGDEKCKQVLNVSQLVYGPEGSDLVLMKLARPAVLDDFVSTIDLPNYGCTIPEKTSCSVYGWGYTGLINYDGLLRVAHLYIMGNEKCSQHHRGKVTLNESEICAGAEKIGSGPCEGDYGGPLVCEQHKMRMVLGVIVPGRGCAIPNRPGIFVRVAYYAKWIHKIILTYKVPQS

SEQ ID NO: 2689 - protein, 649 aa, Homo sapiens
IAGVCGWLLLSGPCGVGLDLDSRLLGASAMRRSEVLAEESIVCLQKALNHLREIWELIGIPEDQRLQRTEVVKKHIKELLDMMIAEEESLKERLIKSISVCQKELNTLCSELHVEPFQEEGETTILQLEKDLRTQVELMRKQKKERKQELKLLQEQDQELCEILCMPHYDIDSASVPSLEELNQFRQHVTTLRETKASRREEFVSIKRQIILCMEALDHTPDTSFERDVVCEDEDAFCLSLENIATLQKLLRQLEMQKSQNEAVCEGLRTQIRELWDRLQIPEEEREAVATIMSGSKAKVRKALQLEVDRLEELKMQNMKKVIEAIRVELVQYWDQCFYSQEQRQAFAPFCAEDYTESLLQLHDAEIVRLKNYYEVHKELFEGVQKWEETWRLFLEFERKASDPNRFTNRGGNLLKEEKQRAKLQKMLPKLEEELKARIELWEQEHSKAFMVNGQKFMEYVAEQWEMHRLEKERAKQERQLKNKKQTETEMLYGSAPRTPSKRRGLAPNTPGKARKLNTTTMSNATANSSIRPIFGGTVYHSPVSRLPPSGSKPVAASTCSGKKTPRTGRHGANKENLELNGSILSGGYPGSAPLQRNFSINSVASTYSEFAKDPSLSDSSTVGLQRELSKASKSDATSGILNSTNIQS

SEQ ID NO: 2690 - protein, 67 aa, Homo sapiens
VPSRFLTLLAHLVVVITLFWSRDSNIQACLPLTFTPEEYDKQDIHALPAVTEMALFVTVFGLKKKPF

SEQ ID NO: 2691 - protein, 636 aa, Homo sapiens
LRLLLLLWAAAASAQGHLRSGPRIFAVWKGHVGQDRVDFGQTEPHTVLFHEPGSSSVWVGGRGKVYLFDFPEGKNASVRTVNIGSTKGSCLDKRDCENYITLLERRSEGLLACGTNARHPSCWNLVNGTVVPLGEMRGYAPFSPDENSLVLFEGDEVYSTIRKQEYNGKIPRFRRIRGESELYTSDTVMQNPQFIKATIVHQDQAYDDKIYYFFREDNPDKNPEAPLNVSRVAQLCRGDQGGESSLSVSKWNTFLKAMLVCSDAATNKNFNRLQDVFLLPDPSGQWRDTRVYGVFSNPWNYSAVCVYSLGDIDKVFRTSSLKGYHSSLPNPRPGKCLPDQQPIPTETFQVADRHPEVAQRVEPMGPLKTPLFHSKYHYQKVAVHRMQASHGETFHVLYLTTDRGTIHKVVEPGEQEHSFAFNIMEIQPFRRAAAIQTMSLDAERRKLYVSSQWEVSQVPLDLCEVYGGGCHGCLMSRDPYCGWDQGRCISIYSSERSVLQSINPAEPHKECPNPKPDKAPLQKVSLAPNSRYYLSCPMESRHATYSWRHKENVEQSCEPGHQSPNCILFIENLTAQQYGHYFCEAQEGSYFREAQHWQLLPEDGIMAEHLLGHACALAASLWLGVLPTLTLGLLVH

SEQ ID NO: 2692 - protein, 216 aa, Homo sapiens
LLLAAACAVFLACPWAVSGARASPGSAASPRLREGPELSPDDPAGLLDLRQGMFAQLVAQNVLLIDGPLSWYSDPGLAGVSLTGGLSYKEDTKELVVAKAGVYYVFFQLELRRVVAGEGSGSVSLALHLQPLRSAAGAAALALTVDLPPASSEARNSAFGFQGRLLHLSAGQRLGVHLHTEARARHAWQLTQGATVLGLFRVTPEIPAGLPSPRSE

SEQ ID NO: 2693 - protein, 142 aa, Homo sapiens
LRAPLLLLAILAVALAVSPAAGSSPGKPPRLVGGPMDASVEEEGVRRALDFAVGEYNKASNDMYHSRALQVVRARKQIVAGVNYFLDVELGRTTCTKTQPNLDNCPFHDQPHLKRKAFCSFQIYAVPWQGTMTLSKSTCQDA

SEQ ID NO: 2694 - protein, 319 aa, Homo sapiens
VRALPWLPWLLWLLCRGGGDADSRAPFTPTWPRSREREAAAFRESLNRHRYLNSLFPSENSTAFYGINQFSYLFPEEFKAIYLRSKPSKFPRYSAEVHMSIPNVSLPLRFDWRDKQVVTQVRNQQMCGGCWAFSVVGAVESAYAIKGKPLEDLSVQQVIDCSYNNYGCNGGSTLNALNWLNKMQVKLVKDSEYPFKAQNGLCHYFSGSHSGFSIKGYSAYDFSDQEDEMAKALLTFGPLVVIVDAVSWQDYLGGIIQHHCSSGEANHAVLITGFDKTGSTPYWIVRNSWGSSWGVDGYAHVKMGSNVCGIADSVSSIFV

SEQ ID NO: 2695 - protein, 676 aa, Homo sapiens
LALALALALGPAATLAGPAKSPYQLVLQHSRLRGRQHGPNVCAVQKVIGTNRKYFTNCKQWYQRKICGKSTVISYECCPGYEKVPGEKGCPAALPLSNLYETLGVVGSTTTQLYTDRTEKLRPEMEGPGSFTIFAPSNEAWASLPAEVLDSLVSNVNIELLNALRYHMVGRRVLTDELKHGMTLTSMYQNSNIQIHHYPNGIVTVNCARLLKADHHATNGVVHLIDKVISTITNNIQQIIEIEDTFETLRAAVAASGLNTMLEGNGQYTLLAPTNEAFEKIPSETLNRILGDPEALRDLLNNHILKSAMCAEAIVAGLSVETLEGTTLEVGCSGDMLTINGKAIISNKDILATNGVIHYIDELLIPDSAKTLFELAAESDVSTAIDLFRQAGLGNHLSGSERLTLLAPLNSVFKDGTPPIDAHTRNLLRNHIIKDQLASKYLYHGQTLETLGGKKLRVFVYRNSLCIENSCIAAHDKRGRYGTLFTMDRVLTPPMGTVMDVLKGDNRFSMLVAAIQSAGLTETLNREGVYTVFAPTNEAFRALPPRERSRLLGDAKELANILKYHIGDEILVSGGIGALVRLKSLQGDKLEVSLKNNVVSVNKEPVAEPDIMATNGVVHVITNVLQPPANRPQERGDELADSALEIFKQASAFSRASQRSVRLAPVYQKLLERMKH

SEQ ID NO: 2696 - protein, 82 aa, Homo sapiens
LPVEEPNPAKRLLFLLLTIVFCQILMAEEGVPAPLPPEDAPNAASLAPTPVSAVLEPFNLTSEPSDYALDLSTFLQQHPAAF

SEQ ID NO: 2697 - protein, 722 aa, Homo sapiens
LPALLLQHVLLHLLLLPIAIPYAEGQRKRRNTIHEFKKSAKTTLIKIDPALKIKTKKVNTADQCANRCTRNKGLPFTCKAFVFDKARKQCLWFPFNSMSSGVKKEFGHEFDLYENKDYIRNCIIGKGRSYKGTVSITKSGIKCQPWSSMIPHEHSFLPSSYRGKDLQENYCRNPRGEEGGPWCFTSNPEVRYEVCDIPQCSEVECMTCNGESYRGLMDHTESGKICQRWDHQTPHRHKFLPERYPDKGFDDNYCRNPDGQPRPWCYTLDPHTRWEYCAIKTCADNTMNDTDVPLETTECIQGQGEGYRGTVNTIWNGIPCQRWDSQYPHEHDMTPENFKCKDLRENYCRNPDGSESPWCFTTDPNIRVGYCSQIPNCDMSHGQDCYRGNGKNYMGNLSQTRSGLTCSMWDKNMEDLHRHIFWEPDASKLNENYCRNPDDDAHGPWCYTGNPLIPWDYCPISRCEGDTTPTIVNLDHPVISCAKTKQLRVVNGIPTRTNIGWMVSLRYRNKHICGGSLIKESWVLTARQCFPSRDLKDYEAWLGIHDVHGRGDEKCKQVLNVSQLVYGPEGSDLVLMKLARPAVLDDFVSTIDLPNYGCTIPEKTSCSVYGWGYTGLINYDGLLRVAHLYIMGNEKCSQHHRGKVTLNESEICAGAEKIGSGPCEGDYGGPLVCEQHKMRMVLGVIVPGRGCAIPNRPGIFVRVAYYAKWIHKIILTYKVPQS

SEQ ID NO: 2698 - protein, 45 aa, Homo sapiens
LAGYALGVGLFLLLLQPLTDPKLYGSLPLCVLLERAGDSEAPLCS

SEQ ID NO: 2699 - protein, 46 aa, Homo sapiens
MRGPASSFYLVALLRARWVTSSCTGATRENSARVLALVVSVQTGTV

SEQ ID NO: 2700 - protein, 59 aa, Homo sapiens
KSIFSGRVPGSSSSFLLFLLLLHLRLLGDHCPLSAADTGCSSRLGLFTYAPHRSLGRPT

SEQ ID NO: 2701 - protein, 339 aa, Homo sapiens
TALLAAWIAAVAATAGPEEAALPPEQSRVQPMTASNWTLVMEGEWMLKFYAPWCPSCQQTDSEWEAFAKNGEILQISVGKVDVIQEPGLSGRFFVTTLPAFFHAKDGIFRRYRGPGIFEDLQNYILEKKWQSVEPLTGWKSPASLTMSGMAGLFSISGKIWHLHNYFTVTLGIPAWCSYVFFVIATLVFGLFMGLVLVVISECFYVPLPRHLSERSEQNRRSEEAHRAEQLQDAEEEKDDSNEEENKDSLVDDEEEKEDLGDEDEAEEEEEEDNLAAGVDEERSEANDQGPPGEDGVTREEVEPEEAEEGISEQPCPADTEVVEDSLRQRKSQHADKGL

SEQ ID NO: 2702 - protein, 178 aa, Homo sapiens
TKEARMLLAWVQAFLVSNMLLAEAYGSGGCFWDNGHLYREDQTSPAPGLRCLNWLDAQSGLASAPVSGAGNHSYCRNPDEDPRGPWCYVSGEAGVPEKRPCEDLRCPETTSQALPAFTTEIQEASEGPGADEVQVFAPANALPARSEAAAVQPVIGISQRVRMNSKEKKDLGTLGGRI

SEQ ID NO: 2703 - protein, 94 aa, Homo sapiens
LALVLVGLVSWRRRQRRLRGASSAEAPDGDKDAPEPLDKVIILSPGISDATAPAWPPPGEDPGTTPPGHSVPVPATELGSTELVTTKTAGPEQQ

SEQ ID NO: 2704 - protein, 67 aa, Homo sapiens
LGTLLALVCVFVICRRYLVMQRLFPRIPHMKDPIGDSFQNDKLVVWEAGKAGLEECLVTEVQVVQKT

SEQ ID NO: 2705 - protein, 655 aa, Homo sapiens
MGLLLLSVVVTSRPEAFQPHHRELLRLLNETLGEVGSPGLLFYSLRTLTTMAPYLSTEDVPLARMLVPKLIMAMQTLIPIDEAKACEALEALDELLESEVPVITPYLSEVLTFCLEVARNVALGNAIRIRILCCLTFLVKVKSKALLKNRLLPPLLHTLFPIVAAEPPPGQLDPEDQDSEEEELEIELMGETPKHFAVQVVDMLALHLPPEKLCPQLMPMLEEALRSESPYQRKAGLLVLAVLSDGAGDHIRQRLLPPLLQIVCKGLEDPSQVVRNAALFALGQFSENLQPHISSYSREVMPLLLAYLKSVPLGHTHHLAKACYALENFVENLGPKVQPYLPELMECMLQLLRNPSSPRAKELAVSALGAIATAAQASLLPYFPAIMEHLREFLLTGREDLQPVQIQSLETLGVLARAVGEPMRPLAEECCQLGLGLCDQVDDPDLRRCTYSLFAALSGLMGEGLAPHLEQITTLMLLSLRSTEGIVPQYDGSSSFLLFDDESDGEEEEELMDEDVEEEDDSEISGYSVENAFFDEKEDTCAAVGEISVNTSVAFLPYMESVFEEVFKLLECPHLNVRKAAHEALGQFCCALHKACQSCPSEPNTAGCPGPSRAILHAGSEQGAGTPGGDGRAGGPDRGAPQLWDPHTEAPWAPR

SEQ ID NO: 2706 - protein, 94 aa, Homo sapiens
MLPTLTAPTLALLLLPKISCLLTSTHPRTQGSRAHFPRAWRLDPGEFLHPLQDPHSSPLWSLDHRWRWPELTCWLWGHSSCWPRMRRGTREYKG

SEQ ID NO: 2707 - protein, 706 aa, Homo sapiens
MRTGWATPRRPAGLLMLLFWFFDLAEPSGRAANDPFTIVHGNTGKCIKPVYGWIVADDCDETEDKLWKWVSQHRLFHLHSQKCLGLDITKSVNELRMFSCDSSAMLWWKCEHHSLYGAARYRLALKDGHGTAISNASDVWKKGGSEESLCDQPYHEIYTRDGNSYGRPCEFPFLIDGTWHHDCILDEDHSGPWCATTLNYEYDRKWGICLKPENGCEDNWEKNEQFGSCYQFNTQTALSWKEAYVSCQNQGADLLSINSAAELTYLKEKEGIAKIFWIGLNQLYSARGWEWSDHKPLNFLNWDPDRPSAPTIGGSSCARMDAESGLWQSFSCEAQLPYVCRKPLNNTVELTDVWTYSDTRCDAGWLPNNGFCYLLVNESNSWDKAHAKCKAFSSDLISIHSLADVEVVVTKLHNEDIKEEVWIGLKNINIPTLFQWSDGTEVTLTYWDENEPNVPYNKTPNCVSYLGELGQWKVQSCEEKLKYVCKRKGEKLNDASSDKMCPPDEGWKRHGETCYKIYEDEVPFGTNCNLTITSRFEQEYLNDLMKKYDKSLRKYFWTGLRDVDSCGEYNWATVGGRRRAVTFSNWNFLEPASPGGCVAMSTGKSVGKWEVKDCRSFKALSICKKMSGPLGPEEASPKPDDPCPEGWQSFPASLSCYKVFHAERIVRKRNWEEAERFCQALGAHLSSFSHVDEIKEFLHFLTDQFR

SEQ ID NO: 2708 - protein, 231 aa, Homo sapiens
RAALWTLGLGPLLLNLWAVPIGGPGALRLAYRHSTCDGVVLVRHHGAWGYVCNQEWTLAEASVVCRQLGCGPAVGAPKYVPLPGEMAQPWLHNVSCRGNESSLWECSLGSWCQSPCPHAWVVVALCSNGTFRELRLVKGRSPCAGLPEIRNVNGVDRLCVLHVEEAMVFCRELGCGPVLQAPRRDVGVVRKYLACRGTEPTIRSCRLDNNFRSGCDLRLDAEVVCSGEAAT

SEQ ID NO: 2709 - protein, 19 aa, Homo sapiens
VRVDMIGRRIVVLFSSLAV

SEQ ID NO: 2710 - protein, 150 aa, Homo sapiens
LEEMVMGLGVLLLVFVLGLGLTPPTLAQDNSRYTHFLTQHYDAKPQGRDDRYCESIMRRRGLTSPCKDINTFIHGNKRSIKAICENKNGNPHRENLRISKSSFQVTTCKLHGGSPWPPCQYRATAGFRNVVVACENGLPVHLDQSIFRRP

SEQ ID NO: 2711 - protein, 42 aa, Homo sapiens
IHCLDKSIFSGRVPGSSSSFLLFLLLLHLRLLGDHCPLSAAE

SEQ ID NO: 2712 - protein, 551 aa, Homo sapiens
LLAFNALLLLLLVAFIMGPQVAFPPALPGPAPVCTGLELLTGAGCFTHTVMYYGHYSNATLNQPCGSPLDGSQCTPRVGGLPYNMPLAYLSTVGVSFFITCITLVYSMAHSFGESYRVGSTSGIHAITVFCSWDYKVTQKRASRLQQDNIRTRLKELLAEWQLRHSPRSVCGRLRQAAVLGLVWLLCLGTALGCAVAVHVFSEFMIQSPEAAGQEAVLLVLPLVVGLLNLGAPYLCRVLAALEPHDSPVLEVYVAICRNLILKLAILGTLCYHWLGRRVGVLQGQCWEDFVGQELYRFLVMDFVLMLLDTLFGELVWRIISEKKLKRRRKPEFDIARNVLELIYGQTLTWLGVLFSPLLPAVQIIKLLLVFYVKKTSLLANCQAPRRPWLASHMSTVFLTLLCFPAFLGAAVFLCYAVWQVKPSSTCGPFRTLDTMYEAGRVWVRHLEAAGPRVSWLPWVHRYLMENTFFVFLVSALLLAVIYLNIQVVRGQRKVICLLKEQISNEGEDKIFLINKLHSIYERKEREERSRVGTTEEAAAPPALLTDEQDA

SEQ ID NO: 2713 - protein, 836 aa, Homo sapiens
LALLLLLLLLLLLQLQHLAAAAADPLLGGQGPAKDCEKDQFQCRNERCIPSVWRCDEDDDCLDHSDEDDCPKKTCADSDFTCDNGHCIHERWKCDGEEECPDGSDESEATCTKQVCPAEKLSCGPTSHKCVPASWRCDGEKDCEGGADEAGCATSLGTCRGDEFQCGDGTCVLAIKHCNQEQDCPDGSDEAGCLQVPPTFLGNRRRPRGLNECLHNNGGCSHICTDLKIGFECTCPAGFQLLDQKTCGDIDECKDPDACSQICVNYKGYFKCECYPGYEMDLLTKNCKAAAGKSPSLIFTNRHEVRRIDLVKRNYSRLIPMLKNVVALDVEVATNRIYWCDLSYRKIYSAYMDKASDPKEQEVLIDEQLHSPEGLAVDWVHKHIYWTDSGNKTISVATVDGGRRRTLFSRNLSEPRAIAVDPLRGFMYWSDWGDQAKIEKSGLNGVDRQTLVSDNIEWPNGITLDLLSQRLYWVDSKLHQLSSIDFSGGNRKTLISSTDFLSHPFGIAVFEDKVFWTDLENEAIFSANRLNGLEISILAENLNNPHDIVIFHELKQPRAPDACELSVQPNGGCEYLCLPAPQISSHSPKYTCACPDTMWLGPDMKRCYRAPQSTSTTTLASTMTRTVPATTRAPGTTVHRSTYQNHSTETPSLTAAVPSSVSVPRAPSISPSTLSPATSNHSQHYANEDSKMGSTVTAAVIGIIVPIVVIALLCMSGYLIWRNWKRKNTKSMNFDNPVYRKTTEEEDEDELHIGRTAQIGHVYPAAISSFDRPLWAEPCLGETREPEDPAPALKELFVLPGEPRSQLHQLPKNPLSELPVVKSKRVALSLEDDGLP

SEQ ID NO: 2714 - protein, 410 aa, Homo sapiens [sequence omitted]

SEQ ID NO: 2715 - protein, 309 aa, Homo sapiens
LGYLLYLVFGAVVFSSVELPYEDLLRQELRKLKRRFLEEHECLSEQQLEQFLGRVLEASNYGVSVLSNASGNWNWDFTSALFFASTVLSTTGYGHTVPLSDGGKAFCIIYSVIGIPFTLLFLTAVVQRITVHVTRRPVLYFHIRWGFSKQVVAIVHAVLLGFVTVSCFFFIPAAVFSVLEDDWNFLESFYFCFISLSTIGLGDYVPGEGYNQKFRELYKIGITCYLLLGLIAMLVVLETFCELHELKKFRKMFYVKKDKDEDQVHIIEHDQLSFSSITDQAAGMKEDQKQNEPFVATQSSACVDGPANH

SEQ ID NO: 2716 - protein, 417 aa, Homo sapiens
IAVAYFGLTTLSASALAVALAFIIKPGSGAQTLQSSDLGLEDSGPPPVPKETVDSFLDLARNLFPSNLVVAAFRTYATDYKVVTQNSSSGNVTHEKIPIGTEIEGMNILGLVLFALVLGVALKKLGSEGEDLIRFFNSLNEATMVLVSWIMWYVPVGIMFLVGSKIVEMKDIIVLVTSLGKYIFASILGHVIHGGIVLPLIYFVFTRKNPFRFLLGLLAPFATAFATCSSSATLPSMMKCIEENNGVDKRISRFILPIGATVNMDGAAIFQCVAAVFIAQLNNVELNAGQIFTILVTATASSVGAAGVPAGGVLTIAIILEAIGLPTHDLPLILAVDWIVDRTTTVVNVEGDALGAGILHHLNQKATKKGEQELAEVKVEAIPNCKSEEETSPLVTHQNPAGPVASAPELESKESVL

SEQ ID NO: 2717 - protein, 589 aa, Homo sapiens
LLLLLVGGAFLGACVAGSDEPGPEGLTSTSLLDLLLPTGLEPLDSEEPSETMGLGAGLGAPGSGFPSEENEESRILQPPQYFWEEEEELNDSSLDLGPTADYVFPDLTEKAGSIEDTSQAQELPNLPSPLPKMNLVEPPWHMPPREEEEEEEEEEEREKEEVEKQEEEEEEELLPVNGSQEEAKPQVRDFSLTSSSQTPGATKSRHEDSGDQASSGVEVESSMGPSLLLPSVTPTTVTPGDQDSTSQEAEATVLPAAGLGVEFEAPQEASEEATAGAAGLSGQHEEVPALPSFPQTTAPSGAEHPDEDPLGSRTSASSPLAPGDMELTPSSATLGQEDLNQQLLEGQAAEAQSRIPWDSTQVICKDWSNLAGKNYIILNMTENIDCEVFRQHRGPQLLALVEEVLPRHGSGHHGAWHISLSKPSEKEQHLLMTLVGEQGVVPTQDVLSMLGDIRRSLEEIGIQNYSTTSSCQARASQVRSDYGTLFVVLVVIGAICIIIIALGLLYNCWQRRLPKLKHVSHGEELRFVENGCHDNPTLDVASDSQSEMQEKHPSLNGGGALNGPGSWGALMGGKRDPEDSDVFEEDTHL

SEQ ID NO: 2718 - protein, 21 aa, Homo sapiens
LLKQLSLLFGFLRLLASERHL

SEQ ID NO: 2719 - protein, 531 aa, Homo sapiens
VSALLMAWFGVLSCVQAEFFTSIGHMTDLIYAEKELVQSLKEYILVEEAKLSKIKSWANKMEALTSKSAADAEGYLAHPVNAYKLVKRLNTDWPALEDLVLQDSAAGFIANLSVQRQFFPTDEDEIGAAKALMRLQDTYRLDPGTISRGELPGTKYQAMLSVDDCFGMGRSAYNEGDYYHTVLWMEQVLKQLDAGEEATTTKSQVLDYLSYAVFQLGDLHRALELTRRLLSLDPSHERAGGNLRYFEQLLEEEREKTLTNQTEAELATPEGIYERPVDYLPERDVYESLCRGEGVKLTPRRQKRLFCRYHHGNRAPQLLIAPFKEEDEWDSPHIVRYYDVMSDEEIERIKEIAKPKLARATVRDPKTGVLTVASYRVSKSSWLEEDDDPVVARVNRRMQHITGLTVKTAELLQVANYGVGGQYEPHFDFSRNDERDTFKHLGTGNRVATFLNYMSDVEAGGATVFPDLGAAIWPKKGTAVFWYNLLRSGEGDYRTRHAACPVLVGCKWVSNKWFHERGQEFLRPCGSTEVD

SEQ ID NO: 2720 - protein, 811 aa, Homo sapiens
LGLSFSWVLLALALLAWCRRSRGLKALRLCRALALLEDEERVVRLGVRACDLPAWVHFPDTERAEWLNKTVKHMWPFICQFIEKLFRETIEPAVRGANTHLSTFSFTKVDVGQQPLRINGVKVYTENVDKRQIILDLQISFVGNCEIDLEIKRYFCRAGVKSIQIHGTMRVILEPLIGDMPLVGALSIFFLRKPLLEINWTGLTNLLDVPGLNGLSDTIILDIISNYLVLPNRITVPLVSEVQIAQLRFPVPKGVLRIHFIEAQDLQGKDTYLKGLVKGKSDPYGIIRVGNQIFQSRVIKENLSPKWNEVYEALVYEHPGQELEIELFDEDPDKDDFLGSLMIDLIEVEKERLLDEWFTLDEVPKGKLHLRLEWLTLMPNASNLDKVLTDIKADKDQANDGLSSALLILYLDSARNLPSNPLEFNPDVLKKTAVQRALKSGKKISSNPNPVVQMSVGHKAQESKIRYKTNEPVWEENFTFFIHNPKRQDLEVEVRDEQHQCSLGNLKVPLSQLLTSEDMTVSQRFQLSNSGPNSTIKMKIALRVLHLEKRERPPDHQHSAQVKRPSVSKEGRKTSIKSHMSGSPGPGGSNTAPSTPVIGGSDKPGMEEKAQPPEAGPQGLHDLGRSSSSLLASPGHISVKEPTPSIASDISLPIATQELRQRLRQLENGTTLGQSPLGQIQLTIRHSSQRNKLIVVVHACRNLIAFSEDGSDPYVRMYLLPDKRRSGRRKTHVSKKTLNPVFDQSFDFSVSLPEVQRRTLDVAVKNSGGFLSKDKGLLGKVLVALASEELAKGWTQWYDLTEDGTRPQAMT

SEQ ID NO: 2721 - protein, 20 aa, Homo sapiens
LKTSLPRVLASLPVYLLVGL

SEQ ID NO: 2722 - protein, 565 aa, Homo sapiens
VESGVLVGVVCLLLACPATATGPEVAQPEVDTTLGRVRGRQVGVKGTDRLVNVFLGIPFAQPPLGPDRFSAPHPAQPWEGVRDASTAPPMCLQDVESMNSSRFVLNGKQQIFSVSEDCLVLNVYSPAEVPAGSGRPVMVWVHGGALITGAATSYDGSALAAYGDVVVVTVQYRLGVLGFFSTGDEHAPGNQGFLDVVAALRWVQENIAPFGGDLNCVTVFGGSAGGSIISGLVLSPVAAGLFHRAITQSGVITTPGIIDSHPWPLAQKIANTLACSSSSPAEMVQCLQQKEGEELVLSKKLKNTIYPLTVDGTVFPKSPKELLKEKPFHSVPFLMGVNNHEFSWLIPRGWGLLDTMEQMSREDMLAISTPVLTSLDVPPEMMPTVIDEYLGSNSDAQAKCQAFQEFMGDVFINVPTVSFSRYLRDSGSPVFFYEFQHRPSSFAKIKPAWVKADHGAEGAFVFGGPFLMDESSRLAFPEATEEEKQLSLTMMAQWTHFARTGDPNSKALPPWPQFNQAEQYLEINPVPRAGQKFREAWMQFWSETLPSKIQQWHQKQKNRKAQEDL

SEQ ID NO: 2723 - protein, 28 aa, Homo sapiens
VPSRFLTLLAHLVVVITLFWSRCPSSCH

SEQ ID NO: 2724 - protein, 193 aa, Homo sapiens
LFALLLFFVGGVAESIRETEVIDPQDLLEGRYFSGALPDDEDVVGPGQESDDFELSGSGDLDDLEDSMIGPEVVHPLVPLDNHIPERAGSGSQVPTEPKKLEENEVIPKRISPVEESEDVSNKVSMSSTVQGSNIFERTEVLAALIVGGIVGILFAVFLILLLMYRMKKKDEGSYDLGKKPIYKKAPTNEFYA

SEQ ID NO: 2725 - protein, 467 aa, Homo sapiens
LYTLVLLLVPSVLDGGRDGDKGAEHCPGLQRSLGVWSLEAAAAGEREQGAEARAAEEGGANQSPRFPSNLSGAVGEAVSREKQHIYVHATWRTGSSFLGELFNQHPDVFYLYEPMWHLWQALYPGDAESLQGALRDMLRSLFRCDFSVLRLYAPPGDPAARAPDTANLTTAALFRWRTNKVICSPPLCPGAPRARAEVGLVEDTACERSCPPVAIRALEAECRKYPVVVIKDVRLLDLGVLVPLLRDPGLNLKVVQLFRDPRAVHNSRLKSRQGLLRESIQVLRTRQRGDRFHRVLLAHGVGARPGGQSRALPAAPRADFFLTGALEVICEAWLRDLLFARGAPAWLRRRYLRLRYEDLVRQPRAQLRRLLRFSGLRALAALDAFALNMTRGAAYGADRPFHLSARDAREAVHAWRERLSREQVRQVEAACAPAMRLLAYPRSGEEGDAEQPREGETPLEMDADGAT

SEQ ID NO: 2726 - protein, 86 aa, Homo sapiens
MVIIIAIGAGIILGYSYKRGKDLKEQHDQKVCEREMQRITLPLSAFTNPTCEIVDEKTVVVHTSQTPVDPQEGTTPLMGQAGTPGA

SEQ ID NO: 2727 - protein, 246 aa, Homo sapiens
LAAALGLLTAGVSALEVYTPKEIFVANGTQGKLTCKFKSTSTTGGLTSVSWSFQPEGADTTVSFFHYSQGQVYLGNYPPFKDRISWAGDLDKKDASINIENMQFIHNGTYICDVKNPPDIVVQPGHIRLYVVEKENLPVFPVWVVVGIVTAVVLGLTLLISMILAVLYRRKNSKRDYTGCSTSESLSPVKQAPRKSPSDTEGLVKSLPSGSHQGPVIYAQLDHSGGHHSDKINKSESVVYADIRKN

SEQ ID NO: 2728 - protein, 19 aa, Homo sapiens
ITIMAVFLCLKTVKQERII

SEQ ID NO: 2729 - protein, 1077 aa, Homo sapiens
VRPPMAAAGQLCLLYLSAGLLSRLGAAFNLDTREDNVIRKYGDPGSLFGFSLAMHWQLQPEDKRLLLVGAPRAEALPLQRANRTGGLYSCDITARGPCTRIEFDNDADPTSESKEDQWMGVTVQSQGPGGKVVTCAHRYEKRQHVNTKQESRDIFGRCYVLSQNLRIEDDMDGGDWSFCDGRLRGHEKFGSCQQGVAATFTKDFHYIVFGAPGTYNWKGIVRVEQKNNTFFDMNIFEDGPYEVGGETEHDESLVPVPANSYLGFSLDSGKGIVSKDEITFVSGAPRANHSGAVVLLKRDMKSAHLLPEHIFDGEGLASSFGYDVAVVDLNKDGWQDIVIGAPQYFDRDGEVGGAVYVYMNQQGRWNNVKPIRLNGTKDSMFGIAVKNIGDINQDGYPDIAVGAPYDDLGKVFIYHGSANGINTKPTQVLKGISPYFGYSIAGNMDLDRNSYPDVAVGSLSDSVTIFRSRPVINIQKTITVTPNRIDLRQKTACGAPSGICLQVKSCFEYTANPAGYNPSISIVGTLEAEKERRKSGLSSRVQFRNQGSEPKYTQELTLKRQKQKVCMEETLWLQDNIRDKLRPIPITASVEIQEPSSRRRVNSLPEVLPILNSDEPKTAHIDVHFLKEGCGDDNVCNSNLKLEYKFCTREGNQDKFSYLPIQKGVPELVLKDQKDIALEITVTNSPSNPRNPTKDGDDAHEAKLIATFPDTLTYSAYRELRAFPEKQLSCVANQNGSQADCELGNPFKRNSNVTFYLVLSTTEVTFDTPDLDINLKLETTSNQDNLAPITAKAKVVIELLLSVSGVAKPSQVYFGGTVVGEQAMKSEDEVGSLIEYEFRVINLGKPLTNLGTATLNIQWPKEISNGKWLLYLVKVESKGLEKVTCEPQKEINSLNLTESHNSRKKREITEKQIDDNRKFSLFAERKYQTLNCSVNVNCVNIRCPLRGLDSKASLILRSRLWNSTFLEEYSKLNYLDILMRAFIDVTAAAENIRLPNAGTQVRVTVFPSKTVAQYSGVPWWIILVAILAGILMLALLVFILWKCGFFKRNKKDHYDATYHKAEIHAQPSDKERLTSDA

SEQ ID NO: 2730 - protein, 758 aa, Homo sapiens
VGISLGFTLSLLSVTWVEEPCGPGPPQPGDSELPPRGNTNAARRPNSVQPGAEREKPGAGEGAGENWEPRVLPYHPAQPGQAAKKAVRTRYISTELGIRQRLLVAVLTSQTTLPTLGVAVNRTLGHRLERVVFLTGARGRRAPPGMAVVTLGEERPIGHLHLALRHLLEQHGDDFDWFFLVPDTTYTEAHGLARLTGHLSLASAAHLYLGRPQDFIGGEPTPGRYCHGGFGVLLSRMLLQQLRPHLEGCRNDIVSARPDEWLGRCILDATGVGCTGDHEGVHYSHLELSPGEPVQEGDPHFRSALTAHPVRDPVHMYQLHKAFARAELERTYQEIQELQWEIQNTSHLAVDGDQAAAWPVGIPAPSRPASRFEVLRWDYFTEQHAFSCADGSPRCPLRGADRADVADVLGTALEELNRRYHPALRLQKQQLVNGYRRFDPARGMEYTLDLQLEALTPQGGRRPLTRRVQLLRPLSRVEILPVPYVTEASRLTVLLPLAAAERDLAPGFLEAFATAALEPGDAAAALTLLLLYEPRQAQRVAHADVFAPVKAHVAELERRFPGARVPWLSVQTAAPSPLRLMDLLSKKHPLDTLFLLAGPDTVLTPDFLNRCRMHAISGWQAFFPMHFQAFHPAVAPPQGPGPPELGRDTGRFDRQAASEACFYNSDYVAARGRLAAASEQEEELLESLDVYELFLHFSSLHVLRAVEPALLQRYRAQTCSARLSEDLYHRCLQSVLEGLGSRTQLAMLLFEQEQGNST

SEQ ID NO: 2731 - protein, 348 aa, Homo sapiens
KFVVFIVAVLLPVRVDSATIPRQDEVPQQTVAPQQQRRSLKEEECPAGSHRSEYTGACNPCTEGVDYTIASNNLPSCLLCTVCKSGQTNKSSCTTTRDTVCQCEKGSFQDKNSPEMCRTCRTGCPRGMVKVSNCTPRSDIKCKNESAASSTGKTPAAEETVTTILGMLASPYHYLIIIVVLVIILAVVVVGFSCRKKFISYLKGICSGGGGGPERVHRVLFRRRSCPSRVPGAEDNARNETLSNRYLQPTQVSEQEIQGQELAELTGVTVELPEEPQRLLEQAEAEGCQRRRLLVPVNDADSADISTLLDASATLEEGHAKETIQDQLVGSEKLFYEEDEAGSATSCL

SEQ ID NO: 2732 - protein, 13 aa, Homo sapiens
VIWCTLIPVTFGL

SEQ ID NO: 2733 - protein, 520 aa, Homo sapiens
LLLLSVLATVHVGQRLLRQRRRQLRSAPPGPFAWPLIGNAAAVGQAAHLSFARLARRYGDVFQIRLGSCPIVVLNGERAIHQALVQQGSAFADRPAFASFRVVSGGRSMAFGHYSEHWKVQRRAAHSMMRNFFTRQPRSRQVLEGHVLSEARELVALLVRGSADGAFLDPRPLTVVAVANVMSAVCFGCRYSHDDPEFRELLSHNEEFGRTVGAGSLVDVMPWLQYFPNPVRTVFREFEQLNRNFSNFILDKFLRHCESLRPGAAPRDMMDAFILSAEKKAAGDSHGGGARLDLENVPATITDIFGASQDTLSTALQWLLLLFTRYPDVQTRVQAELDQVVGRDRLPCMGDQPNLPYVLAFLYEAMRFSSFVPVTIPHATTANTSVLGYHIPKDTVVFVNQWSVNHDPLKWPNPENFDPARFLDKDGLINKDLTSRVMIFSVGKRRCIGEELSKMQLFLFISILAHQCDFRANPNEPAKMNFSYGLTIKPKSFKVNVTLRESMELLDSAVQNLQAKETCQ

SEQ ID NO: 2734 - protein, 33 aa, Homo sapiens
ISLLIILFLPMKPQAHTQRRPQTLNSINKRKTD

SEQ ID NO: 2735 - protein, 473 aa, Homo sapiens
LACLALDLLFLLFYSFWLCCRRRKSEEHLDADCCCTAWCVIIATLVCSAGIAVGFYGNGETSDGIHRATYSLRHANRTVAGVQDRVWDTAVGLNHTAEPSLQTLERQLAGRPEPLRAVQRLQGLLETLLGYTAAIPFWRNTAVSLEVLAEQVDLYDWYRWLGYLGLLLLDVIICLLVLVGLIRSSKGILVGVCLLGVLALVISWGALGLELAVSVGSSDFCVDPDAYVTKMVEEYSVLSGDILQYYLACSPRAANPFQQKLSGSHKALVEMQDVVAELLRTVPWEQPATKDPLLRVQEVLNGTEVNLQHLTALVDCRSLHLDYVQALTGFCYDGVEGLIYLALFSFVTALMFSSIVCSVPHTWQQKRGPDEDGEEEAAPGPRQAHDSLYRVHMPSLYSCGSSYGSETSIPAAAHTVSNAPVTEYMSQNANFQNPRCENTPLIGRESPPPSYTSSMRAKYLATSQPRPDSSGSH

SEQ ID NO: 2736 - protein, 312 aa, Homo sapiens
MSFEDVLLVFSAVVFGAMAVGQVSSFAPDYAKAKISAAHIIMIIEKTPLIDSYSTEGLMPNTLEGNVTFGEVVFNYPTRPDIPVLQGLSLEVKKGQTLALVGSSGCGKSTVVQLLERFYDPLAGKVLLDGKEIKRLNVQWLRAHLGIVSQEPILFDCSIAENIAYGDNSRVVSQEEIVRAAKEANIHAFIESLPNKYSTKVGDKGTQLSGGQKQRIAIARALVRQPHILLLDEATSALDTESEKVVQEALDKAREGRTCIVIAHRLSTIQNADLIVVFQNGRVKEHGTHQQLLAQKGIYFSMVSVQAGTKRQ

SEQ ID NO: 2737 - protein, 793 aa, Homo sapiens
IFWIGLISSVCCVFAQTDENRCLKANAKSCGECIQAGPNCGWCTNSTFLQEGMPTSARCDDLEALKKKGCPPDDIENPRGSKDIKKNKNVTNRSKGTAEKLKPEDITQIQPQQLVLRLRSGEPQTFTLKFKRAEDYPIDLYYLMDLSYSMKDDLENVKSLGTDLMNEMRRITSDFRIGFGSFVEKTVMPYISTTPAKLRNPCTSEQNCTSPFSYKNVLSLTNKGEVFNELVGKQRISGNLDSPEGGFDAIMQVAVCGSLIGWRNVTRLLVFSTDAGFHFAGDGKLGGIVLPNDGQCHLENNMYTMSHYYDYPSIAHLVQKLSENNIQTIFAVTEEFQPVYKELKNLIPKSAVGTLSANSSNVIQLIIDAYNSLSSEVILENGKLSEGVTISYKSYCKNGVNGTGENGRKCSNISIGDEVQFEISITSNKCPKKDSDSFKIRPLGFTEEVEVILQYICECECQSEGIPESPKCHEGNGTFECGACRCNEGRVGRHCECSTDEVNSEDMDAYCRKENSSEICSNNGECVCGQCVCRKRDNTNEIYSGKFCECDNFNCDRSNGLICGGNGVCKCRVCECNPNYTGSACDCSLDTSTCEASNGQICNGRGICECGVCKCTDPKFQGQTCEMCQTCLGVCAEHKECVQCRAFNKGEKKDTCTQECSYFNITKVESRDKLPQPVQPDPVSHCKEKDVDDCWFYFTYSVNGNNEVMVHVVENPECPTGPDIIPIVAGVVAGIVLIGLALLLIWKLLMIIHDRREFAKFEKEKMNAKWDTGENPIYKSAVTTVVNPKYEGK

SEQ ID NO: 2738 - protein, 1341 aa, Homo sapiens
RANDALQVLGLLFSLARGSEVGNSQAVCPGTLNGLSVTGDAENQYQTLYKLYERCEVVMGNLEIVLTGHNADLSFLQWIREVTGYVLVAMNEFSTLPLPNLRVVRGTQVYDGKFAIFVMLNYNTNSSHALRQLRLTQLTEILSGGVYIEKNDKLCHMDTIDWRDIVRDRDAEIVVKDNGRSCPPCHEVCKGRCWGPGSEDCQTLTKTICAPQCNGHCFGPNPNQCCHDECAGGCSGPQDTDCFACRHFNDSGACVPRCPQPLVYNKLTFQLEPNPHTKYQYGGVCVASCPHNFVVDQTSCVRACPPDKMEVDKNGLKMCEPCGGLCPKACEGTGSGSRFQTVDSSNIDGFVNCTKILGNLDFLITGLNGDPWHKIPALDPEKLNVFRTVREITGYLNIQSWPPHMHNFSVFSNLTTIGGRSLYNRGFSLLIMKNLNVTSLGFRSLKEISAGRIYISANRQLCYHHSLNWTKVLRGPTEERLDIKHNRPRRDCVAEGKVCDPLCSSGGCWGPGPGQCLSCRNYSRGGVCVTHCNFLNGEPREFAHEAECFSCHPECQPMEGTATCNGSGSDTCAQCAHFRDGPHCVSSCPHGVLGAKGPIYKYPDVQNECRPCHENCTQGCKGPELQDCLGQTLVLIGKTHLTMALTVIAGLVVIFMMLGGTFLYWRGRRIQNKRAMRRYLERGESIEPLDPSEKANKVLARIFKETELRKLKVLGSGVFGTVHKGVWIPEGESIKIPVCIKVIEDKSGRQSFQAVTDHMLAIGSLDHAHIVRLLGLCPGSSLQLVTQYLPLGSLLDHVRQHRGALGPQLLLNWGVQIAKGMYYLEEHGMVHRNLAARNVLLKSPSQVQVADFGVADLLPPDDKQLLYSEAKTPIKWMALESIHFGKYTHQSDVWSYGVTVWELMTFGAEPYAGLRLAEVPDLLEKGERLAQPQICTIDVYMVMVKCWMIDENIRPTFKELANEFTRMARDPPRYLVIKRESGPGIAPGPEPHGLTNKKLEEVELEPELDLDLDLEAEEDNLATTTLGSALSLPVGTLNRPRGSQSLLSPSSGYMPMNQGNLGESCQESAVSGSSERCPRPVSLHPMPRGCLASESSEGHVTGSEAELQEKVSMCRSRSRSRSPRPRGDSAYHSQRHSLLTPVTPLSPPGLEEEDVNGYVMPDTHLKGTPSSREGTLSSVGLSSVLGTEEEDEDEEYEYMNRRRRHSPPHPPRPSSLEELGYEYMDVGSDLSASLGSTQSCPLHPVPIMPTAGTTPDEDYEYMNRQRDGGGPGGDYAAMGACPASEQGYEEMRAFQGPGHQAPHVHYARLKTLRSLEATDSAFDNPDYWHSRLFPKANAQRT

SEQ ID NO: 2739 - protein, 1493 aa, Homo sapiens
MVSVVGPMGLLVVLLVGGCAAEEPPRFIKEPKDQIGVSGGVASFVCQATGDPKPRVTWNKKGKKVNSQRFETIEFDESAGAVLRIQPLRTPRDENVYECVAQNSVGEITVHAKLTVLREDQLPSGFPNIDMGPQLKVVERTRTATMLCAASGNPDPEITWFKDFLPVDPSASNGRIKQLRSGALQIESSEETDQGKYECVATNSAGVRYSSPANLYVRVRRVAPRFSILPMSHEIMPGGNVNITCVAVGSPMPYVKWMQGAEDLTPEDDMPVGRNVLELTDVKDSANYTCVAMSSLGVIEAVAQITVKSLPKAPGTPMVTENTATSITITWDSGNPDPVSYYVIEYKSKSQDGPYQIKEDITTTRYSIGGLSPNSEYEIWVSAVNSIGQGPPSESVVTRTGEQAPASAPRNVQARMLSATTMIVQWEEPVEPNGLIRGYRVYYTMEPEHPVGNWQKHNVDDSLLTTVGSLLEDETYTVRVLAFTSVGDGPLSDPIQVKTQQGVPGQPMNLRAEARSETSITLSWSPPRQESIIKYELLFREGDHGREVGRTFDPTTSYVVEDLKPNTEYAFRLAARSPQGLGAFTPVVRQRTLQSISPKNFKVKMIMKTSVLLSWEFPDNYNSPTPYKIQYNGLTLDVDGRTTKKLITHLKPHTFYNFVLTNRGSSLGGLQQTVTAWTAFNLLNGKPSVAPKPDADGFIMVYLPDGQSPVPVQSYFIVMVPLRKSRGGQFLTPLGSPEDMDLEELIQDISRLQRRSLRHSRQLEVPRPYIAARFSVLPPTFHPGDQKQYGGFDNRGLEPGHRYVLFVLAVLQKSEPTFAASPFSDPFQLDNPDPQPIVDGEEGLIWVIGPVLAVVFIICIVIAILLYKNKPDSKRKDSEPRTKCLLNNADLAPHHPKDPVEMRRINFQTPGMLSHPPIPIADMAEHTERLKANDSLKLSQEYESIDPGQQFTWEHSNLEVNKPKNRYANVIAYDHSRVILQPIEGIMGSDYINANYVDGYRCQNAYIATQGPLPETFGDFWRMVWEQRSATIVMMTRLEEKSRIKCDQYWPNRGTETYGFIQVTLLDTIELATFCVRTFSLHKNGSSEKREVRQFQFTAWPDHGVPEYPTPFLAFLRRVKTCNPPDAGPIVVHCSAGVGRTGCFIVIDAMLERIKPEKTVDVYGHVTLMRSQRNYMVQTEDQYSFIHEALLEAVGCGNTEVPARSLYAYIQKLAQVEPGEHVTGMELEFKRLANSKAHTSRFISANLPCNKFKNRLVNIMPYESTRVCLQPIRGVEGSDYINASFIDGYRQQKAYIATQGPLAETTEDFWRMLWENNSTIVVMLTKLREMGREKCHQYWPAERSARYQYFVVDPMAEYNMPQYILREFKVTDARDGQSRTVRQFQFTDWPEQGVPKSGEGFIDFIGQVHKTKEQFGQDGPISVHCSAGVGRTGVFITLSIVLERMRYEGVVDIFQTVKMLRTQRPAMVQTEDEYQFCYQAALEYLGSFDHYAT

SEQ ID NO: 2740 - protein, 1883 aa, Homo sapiens
LLLLLLLLPGMWAEAGLPRAGGGSQPPFRTFSASDWGLTHLVVHEQTGEVYVGAVNRIYKLSGNLTLLRAHVTGPVEDNEKCYPPPSVQSCPHGLGSTDNVNKLLLLDYAANRLLACGSASQGICQFLRLDDLFKLGEPHHRKEHYLSSVQEAGSMAGVLIAGPPGQGQAKLFVGTPIDGKSEYFPTLSSRRLMANEEDADMFGFVYQDEFVSSQLKIPSDTLSKFPAFDIYYVYSFRSEQFVYYLTLQLDTQLTSPDAAGEHFFTSKIVRLCVDDPKFYSYVEFPIGCEQAGVEYRLVQDAYLSRPGRALAHQLGLAEDEDVLFTVFAQGQKNRVKPPKESALCLFTLRAIKEKIKERIQSCYRGEGKLSLPWLLNKELGCINSPLQIDDDFCGQDFNQPLGGTVTIEGTPLFVDKDDGLTAVAAYDYRGRTVVFAGTRSGRIRKILVDLSNPGGRPALAYESVVAQEGSPILRDLVLSPNHQYLYAMTEKQVTRVPVESCVQYTSCELCLGSRDPHCGWCVLHSICSRRDACERADEPQRFAADLLQCVQLTVQPRNVSVTMSQVPLVLQAWNVPDLSAGVNCSFEDFTESESVLEDGRIHCRSPSAREVAPITRGQGDQRVVKLYLKSKETGKKFASVDFVFYNCSVHQSCLSCVNGSFPCHWCKYRHVCTHNVADCAFLEGRVNVSEDCPQILPSTQIYVPVGVVKPITLAARNLPQPQSGQRGYECLFHIPGSPARVTALRFNSSSLQCQNSSYSYEGNDVSDLPVNLSVVWNGNFVIDNPQNIQAHLYKCPALRESCGLCLKADPRFECGWCVAERRCSLRHHCAADTPASWMHARHGSSRCTDPKILKLSPETGPRQGGTRLTITGENLGLRFEDVRLGVRVGKVLCSPVESEYISAEQIVCEIGDASSVRAHDALVEVCVRDCSPHYRALSPKRFTFVTPTFYRVSPSRGPLSGGTWIGIEGSHLNAGSDVAVSVGGRPCSFSWRNSREIRCLTPPGQSPGSAPIIININRAQLTNPEVKYNYTEDPTILRIDPEWSINSGGTLLTVTGTNLATVREPRIRAKYGGIERENGCLVYNDTTMVCRAPSVANPVRSPPELGERPDELGFVMDNVRSLLVLNSTSFLYYPDPVLEPLSPTGLLELKPSSPLILKGRNLLPPAPGNSRLNYTVLIGSTPCTLTVSETQLLCEAPNLTGQHKVTVRAGGFEFSPGTLQVYSDSLLTLPAIVGIGGGGGLLLLVIVAVLIAYKRKSRDADRTLKRLQLQMDNLESRVALECKEAFAELQTDIHELTNDLDGAGIPFLDYRTYAMRVLFPGIEDHPVLKEMEVQANVEKSLTLFGQLLTKKHFLLTFIRTLEAQRSFSMRDRGNVASLIMTALQGEMEYATGVLKQLLSDLIEKNLESKNHPKLLLRRTESVAEKMLTNWFTFLLYKFLKECAGEPLFMLYCAIKQQMEKGPIDAITGEARYSLSEDKLIRQQIDYKTLTLNCVNPENENAPEVPVKGLDCDTVTQAKEKLLDAAYKGVPYSQRPKAADMDLEWRQGRMARIILQDEDVTTKIDNDWKRLNTLAHYQVTDGSSVALVPKQTSAYNISNSSTFTKSLSRYESMLRTASSPDSLRSRTPMITPDLESGTKLWHLVKNHDHLDQREGDRGSKMVSEIYLTRLLATKGTLQKFVDDLFETIFSTAHRGSALPLAIKYMFDFLDEQADKHQIHDADVRHTWKSNCLPLRFWVNVIKNPQFVFDIHKNSITDACLSVVAQTFMDSCSTSEHKLGKDSPSNKLLYAKDIPNYKSWVERYYADIAKMPAISDQDMSAYLAEQSRLHLSQFNSMSALHEIYSYITKYKDEILAALEKDEQARRQRLRSKLEQVVDTMALSS

SEQ ID NO: 2741 - protein, 1439 aa, Homo sapiens
LTAAHLLCVCTAALAVAPGPRFLVTAPGIIRPGGNVTIGVELLEHCPSQVTVKAELLKTASNLTVSVLEAEGVFEKGSFKTLTLPSLPLNSADEIYELRVTGRTQDEILFSNSTRLSFETKRISVFIQTDKALYKPKQEVKFRIVTLFSDFKPYKTSLNILIKDPKSNLIQQWLSQQSDLGVISKTFQLSSHPILGDWSIQVQVNDQTYYQSFQVSEYVLPKFEVTLQTPLYCSMNSKHLNGTITAKYTYGKPVKGDVTLTFLPLSFWGKKKNITKTFKINGSANFSFNDEEMKNVMDSSNGLSEYLDLSSPGPVEILTTVTESVTGISRNVSTNVFFKQHDYIIEFFDYTTVLKPSLNFTATVKVTRADGNQLTLEERRNNVVITVTQRNYTEYWSGSNSGNQKMEAVQKINYTVPQSGTFKIEFPILEDSSELQLKAYFLGSKSSMAVHSLFKSPSKTYIQLKTRDENIKVGSPFELVVSGNKRLKELSYMVVSRGQLVAVGKQNSTMFSLTPENSWTPKACVIVYYIEDDGEIISDVLKIPVQLVFKNKIKLYWSKVKAEPSEKVSLRISVTQPDSIVGIVAVDKSVNLMNASNDITMENVVHELELYNTGYYLGMFMNSFAVFQECGLWVLTDANLTKDYIDGVYDNAEYAERFMEENEGHIVDIHDFSLGSSPHVRKHFPETWIWLDTNMGYRIYQEFEVTVPDSITSWVATGFVISEDLGLGLTTTPVELQAFQPFFIFLNLPYSVIRGEEFALEITIFNYLKDATEVKVIIEKSDKFDILMTSNEINATGHQQTLLVPSEDGATVLFPIRPTHLGEIPITVTALSPTASDAVTQMILVKAEGIEKSYSQSILLDLTDNRLQSTLKTLSFSFPPNTVTGSERVQITAIGDVLGPSINGLASLIRMPYGCGEQNMINFAPNIYILDYLTKKKQLTDNLKEKALSFMRQGYQRELLYQREDGSFSAFGNYDPSGSTWLSAFVLRCFLEADPYIDIDQNVLHRTYTWLKGHQKSNGEFWDPGRVIHSELQGGNKSPVTLTAYIVTSLLGYRKYQPNIDVQESIHFLESEFSRGISDNYTLALITYALSSVGSPKAKEALNMLTWRAEQEGGMQFWVSSESKLSDSWQPRSLDIEVAAYALLSHFLQFQTSEGIPIMRWLSRQRNSLGGFASTQDTTVALKALSEFAALMNTERTNIQVTVTGPSSPSPVKFLIDTHNRLLLQTAELAVVQPTAVNISANGFGFAICQLNVVYNVKASGSSRRRRSIQNQEAFDLDVAVKENKDDLNHVDLNVCTSFSGPGRSGMALMEVNLLSGFMVPSEAISLSETVKKVEYDHGKLNLYLDSVNETQFCVNIPAVRNFKVSNTQDASVSIVDYYEPRRQAVRSYNSEVKLSSCDLCSDVQGCRPCEDGASGSHHHSSVIFIFCFKLLYFMELWL

SEQ ID NO: 2742 - protein, 866 aa, Homo sapiens
IPPSQQITMLQTKDLIWTLFFLGTAVSLQVDIVPSQGEISVGESKFFLCQVAGDAKDKDISWFSPNGEKLTPNQQRISVVWNDDSSSTLTIYNANIDDAGIYKCVVTGEDGSESEATVNVKIFQKLMFKNAPTPQEFREGEDAVIVCDVVSSLPPTIIWKHKGRDVILKKDVRFIVLSNNYLQIRGIKKTDEGTYRCEGRILARGEINFKDIQVIVNVPPTIQARQNIVNATANLGQSVTLVCDAEGFPEPTMSWTKDGEQIEQEEDDEKYIFSDDSSQLTIKKVDKNDEAEYICIAENKAGEQDATIHLKVFAKPKITYVENQTAMELEEQVTLTCEASGDPIPSITWRTSTRNISSEEKASWTRPEKQETLDGHMVVRSHARVSSLTLKSIQYTDAGEYICTASNTIGQDSQSMYLEVQYAPKLQGPVAVYTWEGNQVNITCEVFAYPSATISWFRDGQLLPSSNYSNIKIYNTPSASYLEVTPDSENDFGNYNCTAVNRIGQESLEFILVQADTPSSPSIDQVEPYSSTAQVQFDEPEATGGVPILKYKAEWRAVGEEVWHSKWYDAKEASMEGIVTIVGLKPETTYAVRLAALNGKGLGEISAASEFKTQPVQGEPSAPKLEGQMGEDGNSIKVNLIKQDDGGSPIRHYLVRYRALSSEWKPEIRLPSGSDHVMLKSLDWNAEYEVYVVAENQQGKSKAAHFVFRTSAQPTAIPANGSPTSGLSTGAIVGILIVIFVLLLVVVDITCYFLNKCGLFMCIAVNLCGKAGPGAKGKDMEEGKAAFSKDESKEPIVEVRTEEERTPNHDGGKHTEPNETTPLTEPEKGPVEAKPECQETETKPAPAEVKTVPNDATQTKENESKA

SEQ ID NO: 2743 - protein, 35 aa, Homo sapiens
LNFCTKISRNSWMPLLSLAFLFPSSRAICSSCSRA

SEQ ID NO: 2744 - protein, 4543 aa, Homo sapiens
LTPPLLLLLPLLSALVAAAIDAPKTCSPKQFACRDQITCISKGWRCDGERDCPDGSDEAPEICPQSKAQRCQPNEHNCLGTELCVPMSRLCNGVQDCMDGSDEGPHCRELQGNCSRLGCQHHCVPTLDGPTCYCNSSFQLQADGKTCKDFDECSVYGTCSQLCTNTDGSFICGCVEGYLLQPDNRSCKAKNEPVDRPPVLLIANSQNILATYLSGAQVSTITPTSTRQTTAMDFSYANETVCWVHVGDSAAQTQLKCARMPGLKGFVDEHTINISLSLHHVEQMAIDWLTGNFYFVDDIDDRIFVCNRNGDTCVTLLDLELYNPKGIALDPAMGKVFFTDYGQIPKVERCDMDGQNRTKLVDSKIVFPHGITLDLVSRLVYWADAYLDYIEVVDYEGKGRQTIIQGILIEHLYGLTVFENYLYATNSDNANAQQKTSVIRVNRFNSTEYQVVTRVDKGGALHIYHQRRQPRVRSHACENDQYGKPGGCSDICLLANSHKARTCRCRSGFSLGSDGKSCKKPEHELFLVYGKGRPGIIRGMDMGAKVPDEHMIPIENLMNPRALDFHAETGFIYFADTTSYLIGRQKIDGTERETILKDGIHNVEGVAVDWMGDNLYWTDDGPKKTISVARLEKAAQTRKTLIEGKMTHPRAIVVDPLNGWMYWTDWEEDPKDSRRGRLERAWMDGSHRDIFVTSKTVLWPNGLSLDIPAGRLYWVDAFYDRIETILLNGTDRKIVYEGPELNHAFGLCHHGNYLFWTEYRSGSVYRLERGVGGAPPTVTLLRSERPPIFEIRMYDAQQQQVGTNKCRVNNGGCSSLCLATPGSRQCACAEDQVLDADGVTCLANPSYVPPPQCQPGEFACANSRCIQERWKCDGDNDCLDNSDEAPALCHQHTCPSDRFKCENNRCIPNRWLCDGDNDCGNSEDESNATCSARTCPPNQFSCASGRCIPISWTCDLDDDCGDRSDESASCAYPTCFPLTQFTCNNGRCININWRCDNDNDCGDNSDEAGCSHSCSSTQFKCNSGRCIPEHWTCDGDNDCGDYSDETHANCTNQATRPPGGCHTDEFQCRLDGLCIPLRWRCDGDTDCMDSSDEKSCEGVTHVCDPSVKFGCKDSARCISKAWVCDGDNDCEDNSDEENCESLACRPPSHPCANNTSVCLPPDKLCDGNDDCGDGSDEGELCDQCSLNNGGCSHNCSVAPGEGIVCSCPLGMELGPDNHTCQIQSYCAKHLKCSQKCDQNKFSVKCSCYEGWVLEPDGESCRSLDPFKPFIIFSNRHEIRRIDLHKGDYSVLVPGLRNTIALDFHLSQSALYWTDVVEDKIYRGKLLDNGALTSFEVVIQYGLATPEGLAVDWIAGNIYWVESNLDQIEVAKLDGTLRTTLLAGDIEHPRAIALDPRDGILFWTDWDASLPRIEAASMSGAGRRTVHRETGSGGWPNGLTVDYLEKRILWIDARSDAIYSARYDGSGHMEVLRGHEFLSHPFAVTLYGGEVYWTDWRTNTLAKANKWTGHNVTVVQRTNTQPFDLQVYHPSRQPMAPNPCEANGGQGPCSHLCLINYNRTVSCACPHLMKLHKDNTTCYEFKKFLLYARQMEIRGVDLDAPYYNYIISFTVPDIDNVTVLDYDAREQRVYWSDVRTQAIKRAFINGTGVETVVSADLPNAHGLAVDWVSRNLFWTSYDTNKKQINVARLDGSFKNAVVQGLEQPHGLVVHPLRGKLYWTDGDNISMANMDGSNRTLLFSGQKGPVGLAIDFPESKLYWISSGNHTINRCNLDGSGLEVIDAMRSQLGKATALAIMGDKLWWADQVSEKMGTCSKADGSGSVVLRNSTTLVMHMKVYDESIQLDHKGTNPCSVNNGDCSQLCLPTSETTRSCMCTAGYSLRSGQQACEGVGSFLLYSVHEGIRGIPLDPNDKSDALVPVSGTSLAVGIDFHAENDTIYWVDMGLSTISRAKRDQTWREDVVTNGIGRVEGIAVDWIAGNIYWTDQGFDVIEVARLNGSFRYVVISQGLDKPRAITVHPEKGYLFWTEWGQYPRIERSRLDGTERVVLVNVSISWPNGISVDYQDGKLYWCDARTDKIERIDLETGENREVVLSSNNMDMFSVSVFEDFIYWSDRTHANGSIKRGSKDNATDSVPLRTGIGVQLKDIKVFNRDRQKGTNVCAVANGGCQQLCLYRGRGQRACACAHGMLAEDGASCREYAGYLLYSERTILKSIHLSDERNLNAPVQPFEDPEHMKNVIALAFDYRAGTSPGTPNRIFFSDIHFGNIQQINDDGSRRITIVENVGSVEGLAYHRGWDTLYWTSYTTSTITRHTVDQTRPGAFERETVITMSGDDHPRAFVLDECQNLMFWTNWNEQHPSIMRAALSGANVLTLIEKDIRTPNGLAIDHRAEKLYFSDATLDKIERCEYDGSHRYVILKSEPVHPFGLAVYGEHIFWTDWVRRAVQRANKHVGSNMKLLRVDIPQQPMGIIAVANDTNSCELSPCRINNGGCQDLCLLTHQGHVNCSCRGGRILQDDLTCRAVNSSCRAQDEFECANGECINFSLTCDGVPHCKDKSDEKPSYCNSRRCKKTFRQCSNGRCVSNMLWCNGADDCGDGSDEIPCNKTACGVGEFRCRDGTCIGNSSRCNQFVDCEDASDEMNCSATDCSSYFRLGVKGVLFQPCERTSLCYAPSWVCDGANDCGDYSDERDCPGVKRPRCPLNYFACPSGRCIPMSWTCDKEDDCEHGEDETHCNKFCSEAQFECQNHRCISKQWLCDGSDDCGDGSDEAAHCEGKTCGPSSFSCPGTHVCVPERWLCDGDKDCADGADESIAAGCLYNSTCDDREFMCQNRQCIPKHFVCDHDRDCADGSDESPECEYPTCGPSEFRCANGRCLSSRQWECDGENDCHDQSDEAPKNPHCTSQEHKCNASSQFLCSSGRCVAEALLCNGQDDCGDSSDERGCHINECLSRKLSGCSQDCEDLKIGFKCRCRPGFRLKDDGRTCADVDECSTTFPCSQRCINTHGSYKCLCVEGYAPRGGDPHSCKAVTDEEPFLIFANRYYLRKLNLDGSNYTLLKQGLNNAVALDFDYREQMIYWTDVTTQGSMIRRMHLNGSNVQVLHRTGLSNPDGLAVDWVGGNLYWCDKGRDTIEVSKLNGAYRTVLVSSGLREPRALVVDVQNGYLYWTDWGDHSLIGRIGMDGSSRSVIVDTKITWPNGLTLDYVTERIYWADAREDYIEFASLDGSNRHVVLSQDIPHIFALTLFEDYVYWTDWETKSINRAHKTTGTNKTLLISTLHRPMDLHVFHALRQPDVPNHPCKVNNGGCSNLCLLSPGGGHKCACPTNFYLGSDGRTCVSNCTASQFVCKNDKCIPFWWKCDTEDDCGDHSDEPPDCPEFKCRPGQFQCSTGICTNPAFICDGDNDCQDNSDEANCDIHVCLPSQFKCTNTNRCIPGIFRCNGQDNCGDGEDERDCPEVTCAPNQFQCSITKRCIPRVWVCDRDNDCVDGSDEPANCTQMTCGVDEFRCKDSGRCIPARWKCDGEDDCGDGSDEPKEECDERTCEPYQFRCKNNRCVPGRWQCDYDNDCGDNSDEESCTPRPCSESEFSCANGRCIAGRWKCDGDHDCADGSDEKDCTPRCDMDQFQCKSGHCIPLRWRCDADADCMDGSDEEACGTGVRTCPLDEFQCNNTLCKPLAWKCDGEDDCGDNSDENPEECARFVCPPNRPFRCKNDRVCLWIGRQCDGTDNCGDGTDEEDCEPPTAHTTHCKDKKEFLCRNQRCLSSSLRCNMFDDCGDGSDEEDCSIDPKLTSCATNASICGDEARCVRTEKAAYCACRSGFHTVPGQPGCQDINECLRFGTCSQLCNNTKGGHLCSCARNFMKTHNTCKAEGSEYQVLYIADDNEIRSLFPGHPHSAYEQAFQGDESVRIDAMDVHVKAGRVYWTNWHTGTISYRSLPPAAPPTTSNRHRRQIDRGVTHLNISGLKMPRGIAIDWVAGNVYWTDSGRDVIEVAQMKGENRKTLISGMIDEPHAIVVDPLRGTMYWSDWGNHPKIETAAMDGTLRETLVQDNIQWPTGLAVDYHNERLYWADAKLSVIGSIRLNGTDPIVAADSKRGLSHPFSIDVFEDYIYGVTYINNRVFKIHKFGHSPLVNLTGGLSHASDVVLYHQHKQPEVTNPCDRKKCEWLCLLSPSGPVCTCPNGKRLDNGTCVPVPSPTPPPDAPRPGTCNLQCFNGGSCFLNARRQPKCRCQPRYTGDKCELDQCWEHCRNGGTCAASPSGMPTCRCPTGFTGPKCTQQVCAGYCANNSTCTVNQGNQPQCRCLPGFLGDRCQYRQCSGYCENFGTCQMAADGSRQCRCTAYFEGSRCEVNKCSRCLEGACVVNKQSGDVTCNCTDGRVAPSCLTCVGHCSNGGSCTMNSKMMPECQCPPHMTGPRCEEHVFSQQQPGHIASILIPLLLLLLLVLVAGVVFWYKRRVQGAKGFQHQRMTNGAMNVEIGNPTYKMYEGGEPDDVGGLLDADFALDPDKPTNFTNPVYATLYMGGHGSRHSLASTDEKRELLGRGPEDEIGDPLA

SEQ ID NO: 2745 - protein, 1299 aa, Homo sapiens
MPKKKRLSAGRVPLILFLCQMISALEVPLDPKLLEDLVQPPTITQQSPKDYIIDPRENIVIQCEAKGKPPPSFSWTRNGTHFDIDKDPLVTMKPGTGTLIINIMSEGKAETYEGVYQCTARNERGAAVSNNIVVRPSRSPLWTKEKLEPITLQSGQSLVLPCRPPIGLPPPIIFWMDNSFQRLPQSERVSQGLNGDLYFSNVLPEDTREDYICYARFNHTQTIQQKQPISVKVISVDELNDTIAANLSDTEFYGAKSSRERPPTFLTPEGNASNKEELRGNVLSLECIAEGLPTPIIYWAKEDGMLPKNRTVYKNFEKTLQIIHVSEADSGNYQCIAKNALGAIHHTISVRVKAAPYWITAPQNLVLSPGEDGTLICRANGNPKPRISWLTNGVPIEIAPDDPSRKIDGDTIIFSNVQERSSAVYQCNASNEYGYLLANAFVNVLAEPPRILTPANTLYQVIANRPALLDCAFFGSPLPTIEWFKGAKGSALHEDIYVLHENGTLEIPVAQKDSTGTYTCVARNKLGMAKNEVHLEIKDPTWIVKQPEYAVVQRGSMVSFECKVKHDHTLSLTVLWLKDNRELPSDERFTVDKDHLVVADVSDDDSGTYTCVANTTLDSVSASAVLSVVAPTPTPAPVYDVPNPPFDLELTDQLDKSVQLSWTPGDDNNSPITKFIIEYEDAMHKPGLWHHQTEVSGTQTTAQLKLSPYVNYSFRVMAVNSIGKSLPSEASEQYLTKASEPDKNPTAVEGLGSEPDNLVITWKPLNGFESNGPGLQYKVSWRQKDGDDEWTSVVVANVSKYIVSGTPTFVPYLIKVQALNDMGFAPEPAVVMGHSGEDLPMVAPGNVRVNVVNSTLAEVHWDPVPLKSIRGHLQGYRIYYWKTQSSSKRNRRHIEKKILTFQGSKTHGMLPGLEPFSHYTLNVRVVNGKGEGPASPDRVFNTPEGVPSAPSSLKIVNPTLDSLTLEWDPPSHPNGILTEYTLKYQPINSTHELGPLVDLKIPANKTRWTLKNLNFSTRYKFYFYAQTSAGSGSQITEEAVTTVDEAGILPPDVGAGKVQAVNPRISNLTAAAAETYANISWEYEGPEHVNFYVEYGVAGSKEEWRKEIVNGSRSFFGLKGLMPGTAYKVRVGAVGDSGFVSSEDVFETGPAMASRQVDIATQGWFIGLMCAVALLILILLIVCFIRRNKGGKYPVKEKEDAHADPEIQPMKEDDGTFGEYSDAEDHKPLKKGSRTPSDRTVKKEDSDDSLVDYGEGVNGQFNEDGSFIGQYSGKKEKEPAEGNESSEAPSPVNAMNSFV

SEQ ID NO: 2746 - protein, 51 aa, Homo sapiens
IAASGFLFSTNRIWSLVLHLLSVARIPPSPLASPLLGSSPVGIHVSSLTPP

SEQ ID NO: 2747 - protein, 584 aa, Homo sapiens
ILLPFMLLSQGLGVLRVAWDSRACSPALRALLRKLGGLFLPPEASLSLDSSEGLLARAVVQAVIEQLLVSGQPLLIFLEEPPGALGPRLSALGQAWVGFVVQAVQVGIVPDALLVPVAVTYDLVPDAPCDIDHASAPLGLWTGALAVLRSLWSRWGCSHRICSRVHLAQPFSLQEYIVSARSCWGGRQTLEQLLQPIVLGQCTAVPDTEKEQEWTPITGPLLALKEEDQLLVRRLSCHVLSASVGSSAVMSTAIMATLLLFKHQKLLGEFSWLTEEILLRGFDVGFSGQLRSLLQHSLSLLRAHVALLRIRQGDLLVVPQPGPGLTHLAQLSAELLPVFLSEAVGACAVRGLLAGRVPPQGPWELQGILLLSQNELYRQILLLMHLLPQDLLLLKPCQSSYCYCQEVLDRLIQCGLLVAEETPGSRPACDTGRQRLSRKLLWKPSGDFTDSDSDDFGEADGRYFRLSQQSHCPDFFLFLCRLLSPLLKAFAQAAAFLRQGQLPDTELGYTEQLFQFLQATAQEEGIFECADPKLAISAVWTFRDLGVLQQTPSPAGPRLHLSPTFASLDNQEKLEQFIRQFICS

SEQ ID NO: 2748 - protein, 343 aa, Homo sapiens
RPALLLLMLLQTAVLQGRLLRSHSLHYLFMGASEQDLGLSLFEALGYVDDQLFVFYDHESRRVEPRTPWVSSRISSQMWLQLSQSLKGWDHMFTVDFWTIMENHNHSKESHTLQVILGCEMQEDNSTEGYWKYGYDGQDHLEFCPDTLDWRAAEPRAWPTKLEWERHKIRARQNRAYLERDCPAQLQQLLELGRGVLDQQVPPLVKVTHHVTSSVTTLRCRALNYYPQNITMKWLKDKQPMDAKEFEPKDVLPNGDGTYQGWITLAVPPGEEQRYTCQVEHPGLDQPLIVIWEPSPSGTLVIGVISGIAVFVVILFIGILFIILRKRQGSRGAMGHYVLAERE

SEQ ID NO: 2749 - protein, 354 aa, Homo sapiens
LDPKILKFVVFIVAVLLPVRVDSATIPRQDEVPQQTVAPQQQRRSLKEEECPAGSHRSEYTGACNPCTEGVDYTIASNNLPSCLLCTVCKSGQTNKSSCTTTRDTVCQCEKGSFQDKNSPEMCRTCRTGCPRGMVKVSNCTPRSDIKCKNESAASSTGKTPAAEETVTTILGMLASPYHYLIIIVVLVIILAVVVVGFSCRKKFISYLKGICSGGGGGPERVHRVLFRRRSCPSRVPGAEDNARNETLSNRYLQPTQVSEQEIQGQELAELTGVTVELPEEPQRLLEQAEAEGCQRRRLLVPVNDADSADISTLLDASATLEEGHAKETIQDQLVGSEKLFYEEDEAGSATSCL

SEQ ID NO: 2750 - protein, 42 aa, Homo sapiens
LLFVYFLLLPRRRRRHHEGNRALAGRAVRQPNRRQVLGGDQR

SEQ ID NO: 2751 - protein, 1167 aa, Homo sapiens
RTRAALLLFTALATSLGFNLDTEELTAFRVDSAGFGDSVVQYANSWVVVGAPQKITAANQTGGLYQCGYSTGACEPIGLQVPPEAVNMSLGLSLASTTSPSQLLACGPTVHHECGRNMYLTGLCFLLGPTQLTQRLPVSRQECPRQEQDIVFLIDGSGSISSRNFATMMNFVRAVISQFQRPSTQFSLMQFSNKFQTHFTFEEFRRSSNPLSLLASVHQLQGFTYTATAIQNVVHRLFHASYGARRDAAKILIVITDGKKEGDSLDYKDVIPMADAAGIIRYAIGVGLAFQNRNSWKELNDIASKPSQEHIFKVEDFDALKDIQNQLKEKIFAIEGTETTSSSSFELEMAQEGFSAVFTPDGPVLGAVGSFTWSGGAFLYPPNMSPTFINMSQENVDMRDSYLGYSTELALWKGVQSLVLGAPRYQHTGKAVIFTQVSRQWRMKAEVTGTQIGSYFGASLCSVDVDSDGSTDLVLIGAPHYYEQTRGGQVSVCPLPRGWRRWWCDAVLYGEQGHPWGRFGAALTVLGDVNGDKLTDVVIGAPGEEENRGAVYLFHGVLGPSISPSHSQRIAGSQLSSRLQYFGQALSGGQDLTQDGLVDLAVGARGQVLLLRTRPVLWVGVSMQFIPAEIPRSAFECREQVVSEQTLVQSNICLYIDKRSKNLLGSRDLQSSVTLDLALDPGRLSPRATFQETKNRSLSRVRVLGLKAHCENFNLLLPSCVEDSVTPITLRLNFTLVGKPLLAFRNLRPMLAADAQRYFTASLPFEKNCGADHICQDNLGISFSFPGLKSLLVGSNLELNAEVMVWNDGEDSYGTTITFSHPAGLSYRYVAEGQKQGQLRSLHLTCDSAPVGSQGTWSTSCRINHLIFRGGAQITFLATFDVSPKAVLGDRLLLTANVSSENNTPRTSKTTFQLELPVKYAVYTVVSSHEQFTKYLNFSESEEKESHVAMHRYQVNNLGQRDLPVSINFWVPVELNQEAVWMDVEVSHPQNPSLRCSSEKIAPPASDFLAHIQKNPVLDCSIAGCLRFRCDVPSFSVQEELDFTLKGNLSFGWVRQILQKKVSVVSVAEITFDTSVYSQLPGQEAFMRAQTTTVLEKYKVHNPTPLIVGSSIGGLLLLALITAVLYKVGFFKRQYKEMMEEANGQIAPENGTQTPSPPTPHYPQDNV

SEQ ID NO: 2752 - protein, 250 aa, Homo sapiens
LWSVLAAALGLLTAGVSALEVYTPKEIFVANGTQGKLTCKFKSTSTTGGLTSVSWSFQPEGADTTVSFFHYSQGQVYLGNYPPFKDRISWAGDLDKKDASINIENMQFIHNGTYICDVKNPPDIVVQPGHIRLYVVEKENLPVFPVWVVVGIVTAVVLGLTLLISMILAVLYRRKNSKRDYTGCSTSESLSPVKQAPRKSPSDTEGLVKSLPSGSHQGPVIYAQLDHSGGHHSDKINKSESVVYADIRKN

SEQ ID NO: 2753 - protein, 876 aa, Homo sapiens
LASRPLLLALLSLALCRGRVVRVPTATLVRVVGTELVIPCNVSDYDGPSEQNFDWSFSSLGSSFVELASTWEVGFPAQLYQERLQRGEILLRRTANDAVELHIKNVQPSDQGHYKCSTPSTDATVQGNYEDTVQVKVLADSLHVGPSARPPPSLSLREGEPFELRCTAASASPLHTHLALLWEVHRGPARRSVLALTHEGRFHPGLGYEQRYHSGDVRLDTVGSDAYRLSVSRALSADQGSYRCIVSEWIAEQGNWQEIQEKAVEVATVVIQPSVLRAAVPKNVSVAEGKELDLTCNITTDRADDVRPEVTWSFSRMPDSTLPGSRVLARLDRDSLVHSSPHVALSHVDARSYHLLVRDVSKENSGYYYCHVSLWAPGHNRSWHKVAEAVSSPAGVGVTWLEPDYQVYLNASKVPGFADDPTELACRVVDTKSGEANVRFTVSWYYRMNRRSDNVVTSELLAVMDGDWTLKYGERSKQRAQDGDFIFSKEHTDTFNFRIQRTTEEDRGNYYCVVSAWTKQRNNSWVKSKDVFSKPVNIFWALEDSVLVVKARQPKPFFAAGNTFEMTCKVSSKNIKSPRYSVLIMAEKPVGDLSSPNETKYIISLDQDSVVKLENWTDASRVDGVVLEKVQEDEFRYRMYQTQVSDAGLYRCMVTAWSPVRGSLWREAATSLSNPIEIDFQTSGPIFNASVHSDTPSVIRGDLIKLFCIITVEGAALDPDDMAFDVSWFAVHSFGLDKAPVLLSSLDRKGIVTTSRRDWKSDLSLERVSVLEFLLQVHGSEDQDFGNYYCSVTPWVKSPTGSWQKEAEIHSKPVFITVKMDVLNAFKYPLLIGVGLSTVIGLLSCLIGYCSSHWCCKKEVQETRRERRRLMSMEMD

SEQ ID NO: 2754 - protein, 417 aa, Homo sapiens
KADIWALGCLLYKLCFFTLPFGESQVAICDGNFTIPDNSRYSRNIHCLIRFMLEPDPEHRPDIFQVSYFAFKFAKKDCPVSNINNSSIPSALPEPMTASEAAARKSQIKARITDTIGPTETSIAPRQRPKANSATTATPSVLTIQSSATPVKVLAPGEFGNHRPKGALRPGNGPEILLGQGPPQQPPQQHRVLQQLQQGDWRLQQLHLQHRHPHQQQQQQQQQQQQQQQQQQQQQQQQQQQHHHHHHHHLLQDAYMQQYQHATQQQQMLQQQFLMHSVYQPQPSASQYPTMMPQYQQAFFQQQMLAQHQPSQQQASPEYLTSPQEFSPALVSYTSSLPAQVGTIMDSSYSANRSVADKEAIANFTNQKNISNPPDMSGWNPFGEDNFSKLTEEELLDREFDLLRSSKGHLKAYFASQ

SEQ ID NO: 2755 - protein, 1300 aa, Homo sapiens
IMPKKKRLSAGRVPLILFLCQMISALEVPLDPKLLEDLVQPPTITQQSPKDYIIDPRENIVIQCEAKGKPPPSFSWTRNGTHFDIDKDPLVTMKPGTGTLIINIMSEGKAETYEGVYQCTARNERGAAVSNNIVVRPSRSPLWTKEKLEPITLQSGQSLVLPCRPPIGLPPPIIFWMDNSFQRLPQSERVSQGLNGDLYFSNVLPEDTREDYICYARFNHTQTIQQKQPISVKVISVDELNDTIAANLSDTEFYGAKSSRERPPTFLTPEGNASNKEELRGNVLSLECIAEGLPTPIIYWAKEDGMLPKNRTVYKNFEKTLQIIHVSEADSGNYQCIAKNALGAIHHTISVRVKAAPYWITAPQNLVLSPGEDGTLICRANGNPKPRISWLTNGVPIEIAPDDPSRKIDGDTIIFSNVQERSSAVYQCNASNEYGYLLANAFVNVLAEPPRILTPANTLYQVIANRPALLDCAFFGSPLPTIEWFKGAKGSALHEDIYVLHENGTLEIPVAQKDSTGTYTCVARNKLGMAKNEVHLEIKDPTWIVKQPEYAVVQRGSMVSFECKVKHDHTLSLTVLWLKDNRELPSDERFTVDKDHLVVADVSDDDSGTYTCVANTTLDSVSASAVLSVVAPTPTPAPVYDVPNPPFDLELTDQLDKSVQLSWTPGDDNNSPITKFIIEYEDAMHKPGLWHHQTEVSGTQTTAQLKLSPYVNYSFRVMAVNSIGKSLPSEASEQYLTKASEPDKNPTAVEGLGSEPDNLVITWKPLNGFESNGPGLQYKVSWRQKDGDDEWTSVVVANVSKYIVSGTPTFVPYLIKVQALNDMGFAPEPAVVMGHSGEDLPMVAPGNVRVNVVNSTLAEVHWDPVPLKSIRGHLQGYRIYYWKTQSSSKRNRRHIEKKILTFQGSKTHGMLPGLEPFSHYTLNVRVVNGKGEGPASPDRVFNTPEGVPSAPSSLKIVNPTLDSLTLEWDPPSHPNGILTEYTLKYQPINSTHELGPLVDLKIPANKTRWTLKNLNFSTRYKFYFYAQTSAGSGSQITEEAVTTVDEAGILPPDVGAGKVQAVNPRISNLTAAAAETYANISWEYEGPEHVNFYVEYGVAGSKEEWRKEIVNGSRSFFGLKGLMPGTAYKVRVGAVGDSGFVSSEDVFETGPAMASRQVDIATQGWFIGLMCAVALLILILLIVCFIRRNKGGKYPVKEKEDAHADPEIQPMKEDDGTFGEYSDAEDHKPLKKGSRTPSDRTVKKEDSDDSLVDYGEGVNGQFNEDGSFIGQYSGKKEKEPAEGNESSEAPSPVNAMNSFV

SEQ ID NO: 2756 - protein, 46 aa, Homo sapiens
IPPDTKAALLLLLTFLAKQHTDSFQAALGSLPVDKAQELQAVLGLS

SEQ ID NO: 2757 - protein, 404 aa, Homo sapiens
ISLAFLTFSVVLALFLKRPKRSLFFNRDDRGRCETSASELERMNPGPGGKLGHALRVACGDSVLARMLRELGDSLRRPQLRLWSLWWVFNSAGYYLVVYYVHILWNEVDPTTNSARVYNGAADAASTLLGAITSFAAGFVKIRWARWSKLLIAGVTATQAGLVFLLAHTRHPSSIWLCYAAFVLFRGSYQFLVPIATFQIASSLSKELCALVFGVNTFFATIVKTIITFIVSDVRGLGLPVRKQFQLYSVYFLILSIIYFLGAMLDGLRHCQRGHHPRQPPAQGLRSAAEEKAAQALSVQDKGLGGLQPAQSPPLSPEDSLGAVGPASLEQRQSDPYLAQAPAPQAAEFLSPVTTPSPCTLCSAQASGPEAADETCPQLAVHPPGVSKLGLQCLPSDGVQNVNQ

SEQ ID NO: 2758 - protein, 37 aa, Homo sapiens
MLSFFICLLIFVHLLLLSFLISDWPPPTGSAEHKYSG

SEQ ID NO: 2759 - protein, 140 aa, Homo sapiens
MVLTSALLLCSVAGQGCPTLAGILDINFLINKMQEDPASKCHCSANVTSCLCLGIPSDNCTRPCFSERLSQMTNTTMQTRYPLIFSRVKKSVEVLKNNKCPYFSCEQPCNQTTAGNALTFLKSLLEIFQKEKMRGMRGKI

SEQ ID NO: 2760 - protein, 62 aa, Homo sapiens
LNLISLLALRVLAEQNIIPSATNVTCYYQPAPYVSDGNFSNYYVAHPPVTYSQPYPTWLPCN

SEQ ID NO: 2761 - protein, 37 aa, Homo sapiens
LGDLLGTGLLALCFFTDWLLKSKAELGGISELASGPP

SEQ ID NO: 2762 - protein, 33 aa, Homo sapiens
ILTLLLISYLHEYFSLFSVSLKIELPTPKYEIG

SEQ ID NO: 2763 - protein, 287 aa, Homo sapiens
KTSASLPRLVPRVRKMDSYLLMWGLLTFIMVPGCQAELCDDDPPEIPHATFKAMAYKEGTMLNCECKRGFRRIKSGSLYMLCTGNSSHSSWDNQCQCTSSATRNTTKQVTPQPEEQKERKTTEMQSPMQPVDQASLPGHCREPPPWENEATERIYHFVVGQMVYYQCVQGYRALHRGPAESVCKMTHGKTRWTQPQLICTGEMETSQFPGEEKPQASPEGRPESETSCLVTTTDFQIQTEMAATMETSIFTTEYQVAVAGCVFLLISVLLLSGLTWQRRQRKSRRTI

SEQ ID NO: 2764 - protein, 178 aa, Homo sapiens
KGLAVLILAIILLQGTLAQSIKGNHLVKVYDYQEDGSVLLTCDAEAKNITWFKDGKMIGFLTEDKKKWNLGSNAKDPRGMYQCKGSQNKSKPLQVYYRMCQNCIELNAATISGFLFAEIVSIFVLAVGVYFIAGQDGVRQSRASDKQTLLPNDQLYQPLKDREDDQYSHLQGNQLRRN

SEQ ID NO: 2765 - protein, 48 aa, Homo sapiens
LPYFYIIYMAILLTHRCLRDEHRCASKYGRDWERYTAAVPYRLLPGIF

SEQ ID NO: 2766 - protein, 14 aa, Homo sapiens
VVSSLAFWLCHALL

SEQ ID NO: 2767 - protein, 228 aa, Homo sapiens
MGAFRALCGLALLCALSLGQRPTGGPGCGPGRLLLGTGTDARCCRVHTTRCCRDYPGEECCSEWDCMCVQPEFHCGDPCCTTCRHHPCPPGQGVQSQGKFSFGFQCIDCASGTFSGGHEGHCKPWTDCTQFGFLTVFPGNKTHNAVCVPGSPPAEPLGWLTVVLLAVAACVLLLTSAQLGLHIWQLRKTQLLLEVPPSTEDARSCQFPEEERGERSAEEKGRLGDLWV

SEQ ID NO: 2768 - protein, 94 aa, Homo sapiens [sequence omitted]

SEQ ID NO: 2769 - protein, 23 aa, Homo sapiens
ILGYFLTYWLLGLLLHCNFLPWT

SEQ ID NO: 2770 - protein, 34 aa, Homo sapiens
LLLLVASPFLLLATPFVLCCKCKCSKGDDDPLPT

SEQ ID NO: 2771 - protein, 43 aa, Homo sapiens
IPYLTGLGDLLGTGLLALCFFTDWLLKSKAELGGISELASGPP

SEQ ID NO: 2772 - protein, 16 aa, Homo sapiens
IFIFCFKLLYFMELWL

SEQ ID NO: 2773 - protein, 146 aa, Homo sapiens
VTLLFLISLAAHLSQWTRGRSRSHPGQGRSGESVEEVPLYGNLHYLQTGRLSQDPEPDQQDPTLGGPARAAEEVMCYTSLQLRPPQGRIPGPGTPVKYSEVVLDSEPKSQASGPEPELYASVCAQTRRARASFPDQAYANSQPAAS

SEQ ID NO: 2774 - protein, 34 aa, Homo sapiens
MAIPLVFQIMFGILNGLYHYAVFEETLEKTIHEE

SEQ ID NO: 2775 - protein, 201 aa, Homo sapiens
LASGILLLLWLIAPSRACTCVPPHPQTAFCNSDLVIRAKFVGTPEVNQTTLYQRYEIKMTKMYKGFQALGDAADIRFVYTPAMESVCGYFHRSHNRSEEFLIAGKLQDGLLHITTCSFVAPWNSLSLAQRRGFTKTYTVGCEECTVFPCLSIPCKLQSGTHCLWTDQLLQGSEKGFQSRHLACLPREPGLCTWQSLRSQIA

SEQ ID NO: 2776 - protein, 76 aa, Homo sapiens
RRCIGEELSKMQLFLFISILAHQCDFRANPNEPAKMNFSYGLTIKPKSFKVNVTLRESMELLDSAVQNLQAKETCQ

SEQ ID NO: 2777 - protein, 15 aa, Homo sapiens
LGLLLLPPLVLAGIF

SEQ ID NO: 2778 - protein, 82 aa, Homo sapiens
INSSLSTLGLVIMALSNKESHVPYRNSKLTYLLQNSLGGSAKMLMFVNISPLEENVSESLNSLRFASKVNQCVIGTAQANRK

SEQ ID NO: 2779 - protein, 158 aa, Homo sapiens
LHGPAMVKYLLLSILGLAFLSEAAARKIPKVGHTFFQKPESCPPVPGGSMKLDIGIINENQRVSMSRNIESRSTSPWNYTVTWDPNRYPSEVVQAQCRNLGCINAQGKEDISMNSVPIQQETLVVRRKHQGCSVSFQLEKVLVTVGCTCVTPVIHHVQ

SEQ ID NO: 2780 - protein, 11 aa, Homo sapiens
VVMVLFSLFVD

SEQ ID NO: 2781 - protein, 41 aa, Homo sapiens
MQVSTAALAVLLCTMALCNQVLSAPRESMLLLWVSPLSGHG

SEQ ID NO: 2782 - protein, 155 aa, Homo sapiens
MERIVICLMVIFLGTLVHKSSSQGQDRHMIRMRQLIDIVDQLKNYVNDLVPEFLPAPEDVETNCEWSAFSCFQKAQLKSANTGNNERIINVSIKKLKRKPPSTNAGRRQKHRLTCPSCDSYEKKPPKEFLERFKSLLQKMIHQHLSSRTHGSEDS

SEQ ID NO: 2783 - protein, 40 aa, Homo sapiens
MAQNLSIPLAFACLLHLANEKNLKLEGTEDLSDVLVRQGD

SEQ ID NO: 2784 - protein, 201 aa, Homo sapiens
VLLMGLVFASVYIYRYFFLAQLARDNFFRCGVLYEDSLSSQVRTQMELEEDVKIYLDENYERINVPVPQFGGGDPADIIHDFQRGLTAYHDISLDKCYVIELNTTIVLPPRNFWELLMNVKRGTYLPQTYIIQEEMVVTEHVSDKEALGSFIYHLCNGKDTYRLRRRATRRRINKRGAKNCNAIRHFENTFVVETLICGVV

SEQ ID NO: 2785 - protein, 18 aa, Homo sapiens
RWWDLTVGPISLFSALLA

SEQ ID NO: 2786 - protein, 259 aa, Homo sapiens
LPLLLGLSLGCTGAGGFVAHVESTCLLDDAGTPKDFTYCISFNKDLLTCWDPEENKMAPCEFGVLNSLANVLSQHLNQKDTLMQRLRNGLQNCATHTQPFWGSLTNRTRPPSVQVAKTTPFNTREPVMLACYVWGFYPAEVTITWRKNGKLVMPHSSAHKTAQPNGDWTYQTLSHLALTPSYGDTYTCVVEHTGAPEPILRDWTPGLSPMQTLKVSVSAVTLGLGLIIFSLGVISWRRAGHSSYTPLPGSNYSEGWHIS

SEQ ID NO: 2787 - protein, 24 aa, Homo sapiens
VGGMALGVAGLAGLIGLAVSKSKS

SEQ ID NO: 2788 - protein, 38 aa, Homo sapiens
MGLKMLMMMALLVPLVYTIKRHKWSVLKSRKLAYRPPK

SEQ ID NO: 2789 - protein, 71 aa, Homo sapiens
ILGVLSLLLLVTGAFGFHLWRRQWRPRRFSALEQGIHPPQAQSKIEELEQEPEPEPEPEPEPEPEPEPEQL

SEQ ID NO: 2790 - protein, 1035 aa, Homo sapiens
LRWGPRRRPPLLPLLLLLLPPPPRVGGFNLDAEAPAVLSGPPGSFFGFSVEFYRPGTDGVSVLVGAPKANTSQPGVLQGGAVYLCPWGASPTQCTPIEFDSKGSRLLESSLSSSEGEEPVEYKSLQWFGATVRAHGSSILACAPLYSWRTEKEPLSDPVGTCYLSTDNFTRILEYAPCRSDFSWAAGQGYCQGGFSAEFTKTGRVVLGGPGSYFWQGQILSATQEQIAESYYPEYLINLVQGQLQTRQASSIYDDSYLGYSVAVGEFSGDDTEDFVAGVPKGNLTYGYVTILNGSDIRSLYNFSGEQMASYFGYAVAATDVNGDGLDDLLVGAPLLMDRTPDGRPQEVGRVYVYLQHPAGIEPTPTLTLTGHDEFGRFGSSLTPLGDLDQDGYNDVAIGAPFGGETQQGVVFVFPGGPGGLGSKPSQVLQPLWAASHTPDFFGSALRGGRDLDGNGYPDLIVGSFGVDKAVVYRGRPIVSASASLTIFPAMFNPEERSCSLEGNPVACINLSFCLNASGKHVADSIGFTVELQLDWQKQKGGVRRALFLASRQATLTQTLLIQNGAREDCREMKIYLRNESEFRDKLSPIHIALNFSLDPQAPVDSHGLRPALHYQSKSRIEDKAQILLDCGEDNICVPDLQLEVFGEQNHVYLGDKNALNLTFHAQNVGEGGAYEAELRVTAPPEAEYSGLVRHPGNFSSLSCDYFAVNQSRLLVCDLGNPMKAGASLWGGLRFTVPHLRDTKKTIQFDFQILSKNLNNSQSDVVSFRLSVEAQAQVTLNGVSKPEAVLFPVSDWHPRDQPQKEEDLGPAVHHVYELINQGPSSISQGVLELSCPQALEGQQLLYVTRVTGLNCTTNHPINPKGLELDPEGSLHHQQKREAPSRSSASSGPQILKCPEAECFRLRCELGPLHQQESQSLQLHFRVWAKTFLQREHQPFSLQCEAVYKALKMPYRILPRQLPQKERQVATAVQWTKAEGSYGVPLWIIILAILFGLLLLGLLIYILYKLGFFKRSLPYGTAMEKAQLKPPATSDA

SEQ ID NO: 2791 - protein, 50 aa, Homo sapiens
LYKVLGVLFFAIACFLYKPLSESSDGLETCLPSQSSAPDSATDSQLQSSV

SEQ ID NO: 2792 - protein, 19 aa, Homo sapiens
LLLIAVLLGPIYVPWKQKT

SEQ ID NO: 2793 - protein, 7 aa, Homo sapiens
ILGLLLT

SEQ ID NO: 2794 - protein, 9 aa, Homo sapiens
MALLVLACL

SEQ ID NO: 2795 - protein, 33 aa, Homo sapiens
VLHLLLCASQLLLLKQLSLLFGFLRLLASERHL

SEQ ID NO: 2796 - protein, 124 aa, Homo sapiens
KKSGVLFLLGIILLVLIGVQGTPVVRKGRCSCISTNQGTIHLQSLKDLKQFAPSPSCEKIEIIATLKNGVQTCLNPDSADVKELIKKWEKQVSQKKKQKNGKKHQKKKVLKVRKSQRSRQKKTT

SEQ ID NO: 2797 - protein, 87 aa, Homo sapiens
ILLLLAFLLLPRADAGEIIGGHEAKPHSRPYMAYLMIWDQKSLKRCGGFLIRDDFVLTAAHCWGSWRERPSGPELCSPSGYLATRPR

SEQ ID NO: 2798 - protein, 85 aa, Homo sapiens
LVVLVLLAVALQATEAGPYGANMEDSVCCRDYVRYRLPLRVVKHFYWTSDSCPRPGVVLLTFRDKEICADPRVPWVKMILNKLSQ

SEQ ID NO: 2799 - protein, 673 aa, Homo sapiens
MVVILGASNILWIMFAASQAFKIETTPESRYLAQIGDSVSLTCSTTGSFPKDPEIHLSGPLEAGKPITVKCSVADVYPFDRLEIDLLKGDHLMKSQEFLEDADRKSLETKSLEVTFTPVIEDIGKVLVCRAKLHIDEMDSVPTVRQAVKELQVYISPKNTVISVNPSTKLQEGGSVTMTCSSEGLPAPEIFWSKKLDNGNLQHLSGNATLTLIAMRMEDSGIYVCEGVNLIGKNRKEVELIVQEKPFTVEISPGPRIAAQIGDSVMLTCSVMGCESPSFSWRTQIDSPLSGKVRSEGTNSTLTLSPVSFENEHSYLCTVTCGHKKLEKGIQVELYSFPRDPEIEMSGGLVNGSSVTVSCKVPSVYPLDRLEIELLKGETILENIEFLEDTDMKSLENKSLEMTFIPTIEDTGKALVCQAKLHIDDMEFEPKQRQSTQTLYVNVAPRDTTVLVSPSSILEEGSSVNMTCLSQGFPAPKILWSRQLPNGELQPLSENATLTLISTKMEDSGVYLCEGINQAGRSRKEVELIIQVTPKDIKLTAFPSESVKEGDTVIISCTCGNVPETWIILKKKAETGDTVLKSIDGAYTIRKAQLKDAGVYECESKNKVGSQLRSLTLDVQGRENNKDYFSPELLVLYFASSLIIPAIGMIIYFARKANMKGSYSLVEAQKSKV

SEQ ID NO: 2800 - protein, 1497 aa, Homo sapiens
MPRVVYCIHALSLFLFRLGLAPQIHDLYGKVKFTAEELSNMASELAKYGLQLPAFSKIGGILANELSVDEAAVHAAVLAINEAVERGVVEDTLAALQNPSALLENLREPLAAVYQEMLAQAKMEKAANARNHDDRESQDIYDHYLTQAEIQGNINHVNVHGALEVVDDALERQSPEALLKALQDPALALRGVRRDFADWYLEQLNSDREQKAQELGLVELLEKEEVQAGVAAANTKGDQEQAMLHAVQRINKAIRRRVAADTVKELMCPEAQLPPVYPVASSMYQLELAVLQQQQGELGQEELFVAVEMLSAVVLINRALEARDASGFWSSLVNPATGLAEVEGENAQRYFDALLKLRQERGMGEDFLSWNDLQATVSQVNAQTQEETDRVLAVSLINEALDKGSPEKTLSALLLPAAGLDDVSLPVAPRYHLLLVAAKRQKAQVTGDPGAVLWLEEIRQGVVRANQDTNTAQRMALGVAAINQAIKEGKAAQTERVLRNPAVALRGVVPDCANGYQRALESAMAKKQRPADTAFWVQHDMKDGTAYYFHLQTFQGIWEQPPGCPLNTSHLTREEIQSAVTKVTAAYDRQQLWKANVGFVIQLQARLRGFLVRQKFAEHSHFLRTWLPAVIKIQAHWRGYRQRKIYLEWLQYFKANLDAIIKIQAWARMWAARRQYLRRLHYFQKNVNSIVKIQAFFRARKAQDDYRILVHAPHPPLSVVRRFAHLLNQSQQDFLAEAELLKLQEEVVRKIRSNQQLEQDLNIMDIKIGLLVKNRITLQEVVSHCKKLTKRNKEQLSDMMVLDKQKGLKSLSKEKRQKLEAYQHLFYLLQTQPIYLAKLIFQMPQNKTTKFMEAVIFSLYNYASSRREAYLLLQLFKTALQEEIKSKVEQPQDVVTGNPTVVRLVVRFYRNGRGQSALQEILGKVIQDVLEDKVLSVHTDPVHLYKNWINQTEAQTGQRSHLPYDVTPEQALSHPEVQRRLDIALRNLLAMTDKFLLAITSSVDQIPYGMRYVAKVLKATLAEKFPDATDSEVYKVVGNLLYYRFLNPAVVAPDAFDIVAMAAGGALAAPQRHALGAVAQLLQHAAAGKAFSGQSQHLRVLNDYLEETHLKFRKFIHRACQVPEPEERFAVDEYSDMVAVAKPMVYITVGELVNTHRLLLEHQDCIAPDHQDPLHELLEDLGELPTIPDLIGESIAADGHTDLSKLEVSLTLTNKFEGLEADADDSNTRSLLLSTKQLLADIIQFHPGDTLKEILSLSASREQEAAHKQLMSRRQACTAQTPEPLRRHRSLTAHSLLPLAEKQRRVLRNLRRLEALGLVSARNGYQGLVDELAKDIRNQHRHRHRRKAELVKLQATLQGLSTKTTFYEEQGDYYSQYIRACLDHLAPDSKSSGKGKKQPSLHYTAAQLLEKGVLVEIEDLPASHFRNVIFDITPGDEAGKFEVNAKFLGVDMERFQLHYQDLLQLQYEGVAVMKLFNKAKVNVNLLIFLLNKKFLRK

SEQ ID NO: 2801 - protein, 195 aa, Homo sapiens
MYGKSSTRAVLLLLGIQLTALWPIAAVEIYTSRVLEAVNGTDARLKCTFSSFAPVGDALTVTWNFRPLDGGPEQFVFYYHIDPFQPMSGRFKDRVSWDGNPERYDASILLWKLQFDDNGTYTCQVKNPPDVDGVIGEIRLSVVHTVRFSEIHFLALAIGSACALMIIIVIVVVLFQHYRKKRWAERAHKVVEIKS

SEQ ID NO: 2802 - protein, 130 aa, Homo sapiens
MPARRLLLLLTLLLPGLGIFGSTSTVTLPETLLFVSTLDGSLHAVSKRTGSIKWTLKEDPVLQVPTHVEEPAFLPDPNDGSLYTLGSKNNEGLTKLPFTIPELVQASPCRSSDGILYMGKSSCLQKLVSL

SEQ ID NO: 2803 - protein, 142 aa, Homo sapiens
MFSHLPFDCVLLLLLLLLTRSSEVEYRAEVGQNAYLPCFYTPAAPGNLVPVCWGKGACPVFECGNVVLRTDERDVNYWTSRYWLNGDFRKGDVSLTIENVTLADSGIYCCRIQIPGIMNDEKFNLKLVIKPGEWTFACHLYE

SEQ ID NO: 2804 - protein, 539 aa, Homo sapiens
IFSSVLQTSLLFLLMGLRASGKDSAPTVVSGILGGSVTLPLNISVDTEIENVIWIGPKNALAFARPKENVTIMVKSYLGRLDITKWSYSLCISNLTLNDAGSYKAQINQRNFEVTTEEEFTLFVYEQLQEPQVTMKSVKVSENFSCNITLMCSVKGAEKSVLYSWTPREPHASESNGGSILTVSRTPCDPDLPYICTAQNPVSQRSSLPVHVGQFCTDPGASRGGTTGETVVGVLGEPVTLPLALPACRDTEKVVWLFNTSIISKEREEAATADPLIKSRDPYKNRVWVSSQDCSLKISQLKIEDAGPYHAYVCSEASSVTSMTHVTLLIYRPERNTKLWIGLFLMVCLLCVGIFSWCIWKRKGRCSVPAFCSSQAEAPADTPEPTAGHTLYSVLSQGYEKLDTPLRPARQQPTPTSDSSSDSNLTTEEDEDRPEVHKPISGRYEVFDQVTQEGAGHDPAPEGQADYDPVTPYVTEVESVVGENTMYAQVFNLQGKTPVSQKEESSATIYCSIRKPQVVPPPQQNDLEIPESPTYENFT

SEQ ID NO: 2805 - protein, 529 aa, Homo sapiens
VSALLMAWFGVLSCVQAEFFTSIGHMTDLIYAEKELVQSLKEYILVEEAKLSKIKSWANKMEALTSKSAADAEGYLAHPVNAYKLVKRLNTDWPALEDLVLQDSAAGFIANLSVQRQFFPTDEDEIGAAKALMRLQDTYRLDPGTISRGELPGTKYQAMLSVDDCFGMGRSAYNEGDYYHTVLWMEQVLKQLDAGEEATTTKSQVLDYLSYAVFQLGDLHRALELTRRLLSLDPSHERAGGNLRYFEQLLEEEREKTLTNQTEAELATPEGIYERPVDYLPERDVYESLCRGEGVKLTPRRQKRLFCRYHHGNRAPQLLIAPFKEEDEWDSPHIVRYYDVMSDEEIERIKEIAKPKLARATVRDPKTGVLTVASYRVSKSSWLEEDDDPVVARVNRRMQHITGLTVKTAELLQVANYGVGGQYEPHFDFSRRPFDSGLKTEGNRLATFLNYMSDVEAGGATVFPDLGAAIWPKKGTAVFWYNLLRSGEGDYRTRHAACPVLVGCKWVSNKWFHERGQEFLRPCGSTEVD

SEQ ID NO: 2806 - protein, 2408 aa, Homo sapiens
IFIPLVLFFILLGLRQKKPTISVKEVAFYTAAPLTSAGILPVMQSLCPDGQRDEFGFLQYANSTVTQLLERLDRVVEEGNLFDPARPSLGSELEALRQHLEALSAGPGTSGSHLDRSTVSSFSLDSVARNPQELWRFLTQNLSLPNSTAQALLAARVDPPEVYHLLFGPSSALDSQSGLHKGQEPWSRLGGNPLFRMEELLLAPALLEQLTCTPGSGELGRILTVPESQKGALQGYRDAVCSGQAAARARRFSGLSAELRNQLDVAKVSQQLGLDAPNGSDSSPQAPPPRRLQALLGDLLDAQKVLQDVDVLSALALLLPQGACTGRTPGPPASGAGGAANGTGAGAVMGPNATAEEGAPSAAALATPDTLQGQCSAFVQLWAGLQPILCGNNRTIEPEALRRGNMSSLGFTSKEQRNLGLLVHLMTSNPKILYAPAGSEVDRVILKANETFAFVGNVTHYAQVWLNISAEIRSFLEQGRLQQHLRWLQQYVAELRLHPEALNLSLDELPPALRQDNFSLPSGMALLQQLDTIDNAACGWIQFMSKVSVDIFKGFPDEESIVNYTLNQAYQDNVTVFASVIFQTRKDGSLPPHVHYKIRQNSSFTEKTNEIRRAYWRPGPNTGGRFYFLYGFVWIQDMMERAIIDTFVGHDVVEPGSYVQMFPYPCYTRDDFLFVIEHMMPLCMVISWVYSVAMTIQHIVAEKEHRLKEVMKTMGLNNAVHWVAWFITGFVQLSISVTALTAILKYGQVLMHSHVVIIWLFLAVYAVATIMFCFLVSVLYSKAKLASACGGIIYFLSYVPYMYVAIREEVAHDKITAFEKCIASLMSTTAFGLGSKYFALYEVAGVGIQWHTFSQSPVEGDDFNLLLAVTMLMVDAVVYGILTWYIEAVHPGMYGLPRPWYFPLQKSYWLGSGRTEAWEWSWPWARTPRLSVMEEDQACAMESRRFEETRGMEEEPTHLPLVVCVDKLTKVYKDDKKLALNKLSLNLYENQVVSFLGHNGAGKTTTMSILTGLFPPTSGSATIYGHDIRTEMDEIRKNLGMCPQHNVLFDRLTVEEHLWFYSRLKSMAQEEIRREMDKMIEDLELSNKRHSLVQTLSGGMKRKLSVAIAFVGGSRAIILDEPTAGVDPYARRAIWDLILKYKPGRTILLSTHHMDEADLLGDRIAIISHGKLKCCGSPLFLKGTYGDGYRLTLVKRPAEPGGPQEPGLASSPPGRAPLSSCSELQVSQFIRKHVASCLLVSDTSTELSYILPSEAAKKGAFERLFQHLERSLDALHLSSFGLMDTTLEEVFLKVSEEDQSLENSEADVKESRKDVLPGAEGPASGEGHAGNLARCSELTQSQASLQSASSVGSARGDEGAGYTDVYGDYRPLFDNPQDPDNVSLQEVEAEALSRVGQGSRKLDGGWLKVRQFHGLLVKRFHCARRNSKALFSQILLPAFFVCVAMTVALSVPEIGDLPPLVLSPSQYHNYTQPRGNFIPYANEERREYRLRLSPDASPQQLVSTFRLPSGVGATCVLKSPANGSLGPTLNLSSGESRLLAARFFDSMCLESFTQGLPLSNFVPPPPSPAPSDSPASPDEDLQAWNVSLPPTAGPEMWTSAPSLPRLVREPVRCTCSAQGTGFSCPSSVGGHPPQMRVVTGDILTDITGHNVSEYLLFTSDRFRLHRYGAITFGNVLKSIPASFGTRAPPMVRKIAVRRAAQVFYNNKGYHSMPTYLNSLNNAILRANLPKSKGNPAAYGITVTNHPMNKTSASLSLDYLLQGTDVVIAIFIIVAMSFVPASFVVFLVAEKSTKAKHLQFVSGCNPIIYWLANYVWDMLNYLVPATCCVIILFVFDLPAYTSPTNFPAVLSLFLLYGWSITPIMYPASFWFEVPSSAYVFLIVINLFIGITATVATFLLQLFEHDKDLKVVNSYLKSCFLIFPNYNLGHGLMEMAYNEYINEYYAKIGQFDKMKSPFEWDIVTRGLVAMAVEGVVGFLLTIMCQYNFLRRPQRMPVSTKPVEDDVDVASERQRVLRGDADNDMVKIENLTKVYKSRKIGRILAVDRLCLGVRPGECFGLLGVNGAGKTSTFKMLTGDESTTGGEAFVNGHSVLKELLQVQQSLGYCPQCDALFDELTAREHLQLYTRLRGISWKDEARVVKWALEKLELTKYADKPAGTYSGGNKRKLSTAIALIGYPAFIFLDEPTTGMDPKARRFLWNLILDLIKTGRSVVLTSHSMEECEALCTRLAIMVNGRLRCLGSIQHLKNRFGDGYMITVRTKSSQSVKDVVRFFNRNFPEAMLKERHHTKVQYQLKSEHISLAQVFSKMEQVSGVLGIEDYSVSQTTLDNVFVNFAKKQSDNLEQQETEPPSALQSPLGCLLSLLRPRSAPTELRALVADEPEDLDTEDEGLISFEEERAQLSFNTDTLC

SEQ ID NO: 2807 - protein, 38 aa, Homo sapiens
LVPCVLGLLLLPILAMLMALCVHCHRLPGSYDSTSSDR

SEQ ID NO: 2808 - protein, 560 aa, Homo sapiens
LRLRLLALLLLLLAPPARAPKPSAQDVSLGVDWLTRYGYLPPPHPAQAQLQSPEKLRDAIKVMQRFAGLPETGRMDPGTVATMRKPRCSLPDVLGVAGLVRRRRRYALSGSVWKKRTLTWRVRSFPQSSQLSQETVRVLMSYALMAWGMESGLTFHEVDSPQGQEPDILIDFARAFHQDSYPFDGLGGTLAHAFFPGEHPISGDTHFDDEETWTFGSKDGEGTDLFAVAVHEFGHALGLGHSSAPNSIMRPFYQGPVGDPDKYRLSQDDRDGLQQLYGKAPQTPYDKPTRKPLAPPPQPPASPTHSPSFPIPDRCEGNFDAIANIRGETFFFKGPWFWRLQPSGQLVSPRPARLHRFWEGLPAQVRVVQAAYARHRDGRILLFSGPQFWVFQDRQLEGGARPLTELGLPPGEEVDAVFSWPQNGKTYLVRGRQYWRYDEAAARPDPGYPRDLSLWEGAPPSPDDVTVSNAGDTYFFKGAHYWRFPKNSIKTEPDAPQPMGPNWLDCPAPSSGPRAPRPPKATPVSETCDCQCELNQAAGRWPAPIPLLLLPLLVGGVASR

SEQ ID NO: 2809 - protein, 43 aa, Homo sapiens
RSTAEDSSTPRDMLGLRPPLLALVGLLSLGCGEFCVPRRGLHA

SEQ ID NO: 2810 - protein, 378 aa, Homo sapiens
MGQVTALLTSIGWTLPVLPELDDLTVGGLIMGTGIESSSHKYGLFQHICTAYELVLADGSFVRCTPSENSDLFYAVPWSCGTLGFLVAAEIRIIPAKKYVKLRFEPVRGLEAICAKFTHESQRQENHFVEGLLYSLDEAVIMTGVMTDEAEPSKLNSIGNYYKPWFFKHVENYLKTNREGLEYIPLRHYYHRHTRSIFWELQDIIPFGNNPIFRYLFGWMVPPKISLLKLTQGETLRKLYEQHHVVQDMLVPMKCLQQALHTFQNDIHVYPIWLCPFILPSQPGLVHPKGNEAELYIDIGAYGEPRVKHFEARSCMRQLEKFVRSVHGFQMLYADCYMNREEFWEMFDGSLYHKLREKLGCQDAFPEVYDKICKAARH

SEQ ID NO: 2811 - protein, 34 aa, Homo sapiens
LIKTFPLKLASGLISLFQESLWLVGFQYAPVPDC

SEQ ID NO: 2812 - protein, 25 aa, Homo sapiens
ILRVGFAAFSVLWACCSRICGAKQP

SEQ ID NO: 2813 - protein, 346 aa, Homo sapiens
LAFLLLNFRVCLLLLQLLMPHSAQFSVLGPSGPILAMVGEDADLPCHLFPTMSAETMELKWVSSSLRQVVNVYADGKEVEDRQSAPYRGRTSILRDGITAGKAALRIHNVTASDSGKYLCYFQDGDFYEKALVELKVAALGSDLHVDVKGYKDGGIHLECRSTGWYPQPQIQWSNNKGENIPTVEAPVVADGVGLYAVAASVIMRGSSGEGVSCTIRSSLLGLEKTASISIADPFFRSAQRWIAALAGTLPVLLLLLGGAGYFLWQQQEEKKTQFRKKKREQELREMAWSTMKQEQSTRVKLLEELRWRSIQYASRGERHSAYNEWKKALFKPGEEMLQMRLHFVK

SEQ ID NO: 2814 - protein, 13 aa, Homo sapiens
VWDFWVFSWLASC

SEQ ID NO: 2815 - protein, 19 aa, Homo sapiens
IMTALQIASFILLRLFAED

SEQ ID NO: 2816 - protein, 20 aa, Homo sapiens
LTGFTIMVVLTMYSGQIQIG

SEQ ID NO: 2817 - protein, 1170 aa, Homo sapiens
VPATPGSPPSRFWLLPAMALRVLLLTALTLCHGFNLDTENAMTFQENARGFGQSVVQLQGSRVVVGAPQEIVAANQRGSLYQCDYSTGSCEPIRLQVPVEAVNMSLGLSLAATTSPPQLLACGPTVHQTCSENTYVKGLCFLFGSNLRQQPQKFPEALRGCPQEDSDIAFLIDGSGSIIPHDFRRMKEFVSTVMEQLKKSKTLFSLMQYSEEFRIHFTFKEFQNNPNPRSLVKPITQLLGRTHTATGIRKVVRELFNITNGARKNAFKILVVITDGEKFGDPLGYEDVIPEADREGVIRYVIGVGDAFRSEKSRQELNTIASKPPRDHVFQVNNFEALKTIQNQLREKIFAIEGTQTGSSSSFEHEMSQEGFSAAITSNGPLLSTVGSYDWAGGVFLYTSKEKSTFINMTRVDSDMNDAYLGYAAAIILRNRVQSLVLGAPRYQHIGLVAMFRQNTGMWESNANVKGTQIGAYFGASLCSVDVDSNGSTDLVLIGAPHYYEQTRGGQVSVCPLPRGQRARWQCDAVLYGEQGQPWGRFGAALTVLGDVNGDKLTDVAIGAPGEEDNRGAVYLFHGTSGSGISPSHSQRIAGSKLSPRLQYFGQSLSGGQDLTMDGLVDLTVGAQGHVLLLRSQPVLRVKAIMEFNPREVARNVFECNDQVVKGKEAGEVRVCLHVQKSTRDRLREGQIQSVVTYDLALDSGRPHSRAVFNETKNSTRRQTQVLGLTQTCETLKLQLPNCIEDPVSPIVLRLNFSLVGTPLSAFGNLRPVLAEDAQRLFTALFPFEKNCGNDNICQDDLSITFSFMSLDCLVVGGPREFNVTVTVRNDGEDSYRTQVTFFFPLDLSYRKVSTLQNQRSQRSWRLACESASSTEVSGALKSTSCSINHPIFPENSEVTFNITFDVDSKASLGNKLLLKANVTSENNMPRTNKTEFQLELPVKYAVYMVVTSHGVSTKYLNFTASENTSRVMQHQYQVSNLGQRSLPISLVFLVPVRLNQTVIWDRPQVTFSENLSSTCHTKERLPSHSDFLAELRKAPVVNCSIAVCQRIQCDIPFFGIQEEFNATLKGNLSFDWYIKTSHNHLLIVSTAEILFNDSVFTLLPGQGAFVRSQTETKVEPFEVPNPLPLIVGSSVGGLLLLALITAALYKLGFFKRQYKDMMSEGGPPGAEPQ

SEQ ID NO: 2818 - protein, 99 aa, Homo sapiens [sequence omitted]

SEQ ID NO: 2819 - protein, 70 aa, Homo sapiens
MEEIKKVLLLVLGCAVQCERKEEFIERIKQLDIETQAGIVAHIQEVGAWPRGGLSCGLLLLWWPGGKTSL

SEQ ID NO: 2820 - protein, 19 aa, Homo sapiens
LLYSGVFVAFWACALAVGS

SEQ ID NO: 2821 - protein, 16 aa, Homo sapiens
LLITMVVISSLNAGFI

SEQ ID NO: 2822 - protein, 32 aa, Homo sapiens
MIAVSGICILLNVTELCYLLIRYCSGKSKKPV

SEQ ID NO: 2823 - protein, 37 aa, Homo sapiens
MLIGFIIYFGYGLWHSEEASLDADQARTPDGNLDQCK

SEQ ID NO: 2824 - protein, 20 aa, Homo sapiens
KITIMAVFLCLKTVKQERII

SEQ ID NO: 2825 - protein, 69 aa, Homo sapiens
ILMCFWYLTSANIPSETLRGASVFQVKLGNQNVETKQLLSASYEFQREFTQGVKPDWTIARIEHSKLLE

SEQ ID NO: 2826 - protein, 149 aa, Homo sapiens
LLLSILGLAFLSEAAARKIPKVGHTFFQKPESCPPVPGGSMKLDIGIINENQRVSMSRNIESRSTSPWNYTVTWDPNRYPSEVVQAQCRNLGCINAQGKEDISMNSVPIQQETLVVRRKHQGCSVSFQLEKVLVTVGCTCVTPVIHHVQ

SEQ ID NO: 2827 - protein, 164 aa, Homo sapiens
LATSCLLLLALLVQGGAAAPISSHCRLDKSNFQQPYITNRTFMLAKEASLADNNTDVRLIGEKLFHGVSMSERCYLMKQVLNFTLEEVLFPQSDRFQPYMQEVVPFLARLSNRLSTCHIEGDDLHIQRNVQKLKDTVKKLGESGEIKAIGELDLLFMSLRNACI

SEQ ID NO: 2828 - protein, 67 aa, Homo sapiens
MISASVICMLLNVAELCYLLLKVCFRRSKRAQTQKNHPNHALKESKQNEMNELISDSGQNAITGFPS

SEQ ID NO: 2829 - protein, 61 aa, Homo sapiens
MGKRKCIGETIARWEVFLFLAILLQRVEFSVPLGVKVDMTPIYGLTMKHACCEHFQMQLRS

SEQ ID NO: 2830 - protein, 77 aa, Homo sapiens
IILLFCAVVPGTLLLFRKRWQNEKLGLDAGDEYEDENLYEGLNLDDCSMYEDISRGLQGTYQDVGSLNIGDVQLEKP

SEQ ID NO: 2831 - protein, 54 aa, Homo sapiens
IMGLLYKVLGVLFFAIACFLYKPLSESSDGLETCLPSQSSAPDSATDSQLQSSV

SEQ ID NO: 2832 - protein, 36 aa, Homo sapiens
LKQQTMLGLLFHLLLRSPTLMVLERRCRNWEKVKGL

SEQ ID NO: 2833 - protein, 66 aa, Homo sapiens
RVILIFHSVALCLASLNSCLDPVIYYFSTNEFRRRLSRQDLHDSIQLHAKSFVSNHTASTMTPELC

SEQ ID NO: 2834 - protein, 45 aa, Homo sapiens
LAVGGLLFYRWRRRSHQEPQRADSPLEQPEGSPLTQDDRQVELPV

SEQ ID NO: 2835 - protein, 14 aa, Homo sapiens
KLEIGILISFYLID

SEQ ID NO: 2836 - protein, 54 aa, Homo sapiens
LGLAVGLALLLYCYPPDPKGLPGTRRVLGFSPVIIDRHVSRYLLAFLADDLGGL

SEQ ID NO: 2837 - protein, 14 aa, Homo sapiens
IGRRIVVLFSSLAV

SEQ ID NO: 2838 - protein, 87 aa, Homo sapiens
TTATLLCLLSATALLCSLGHPRPHLLRLPDLPSFPAFLWIPASGHPSPPSLQGPLLVSLLLEPLPPPPSLQNFSFTPHPPPLPPFLF

SEQ ID NO: 2839 - protein, 51 aa, Homo sapiens
IARWEVFLFLAILLQRVEFSVPLGVKVDMTPIYGLTMKHACCEHFQMQLRS

SEQ ID NO: 2840 - protein, 283 aa, Homo sapiens
LLLLPLLLGLNAGAVIDWPTEEGKEVWDYVTVRKDAYMFWWLYYATNSCKNFSELPLVMWLQGGPGGSSTGFGNFEEIGPLDSDLKPRKTTWLQAASLLFVDNPVGTGFSYVNGSGAYAKDLAMVASDMMVLLKTFFSCHKEFQTVPFYIFSESYGGKMAAGIGLELYKAIQRGTIKCNFAGVALGDSWISPVDSVLSWGPYLYSMSLLEDKGLAEVSKVAEQVLNAVNKGLYREATELWGKAEMIIEQNTDGVNFYNILTKSTPTSTMESSLEFTQSHLVWF

SEQ ID NO: 2841 - protein, 30 aa, Homo sapiens
IFFFFCIIVSSLPTAELGTENACSTCLLNE

SEQ ID NO: 2842 - protein, 69 aa, Homo sapiens
MGTALKLLLGAGAVAYGVRESVFTVEGGHRAIFFNRIGGVQQDTILAEGLHFRSPHHRIVSISQLTTLC

SEQ ID NO: 2843 - protein, 224 aa, Homo sapiens [sequence omitted]

SEQ ID NO: 2844 - protein, 449 aa, Homo sapiens
MTLGIYLQLFFLSIVSQPTFINSVLPISAALPSLDQKKRGGHKACCLLTPPPPPLFPPPFFRGGRSPLLSPDMKNLMLELETSQSPCMQGSLGSPGPPGPQGPPGLPGKTGPKGEKGELGRPGRKGRPGPPGVPGMPGPIGWPGPEGPRGEKGDLGMMGLPGSRGPMGSKGYPGSRGEKGSRGEKGDLGPKGEKGFPGFPGMLGQKGEMGPKGEPGIAGHRGPTGRPGKRGKQGQKGDSGVMGPPGKPGPSGQPGRPGPPGPPPAGQLIMGPKGERGFPGPPGRCLCGPTMNVNNPSYGESVYGPSSPRVPVIFVVNNQEELERLNTQNAIAFRRDQRSLYFKDSLGWLPIQLTPFYPVDYTADQHGTCGDGLLQPGEECDDGNSDVGDDCIRCHRAYCGDGHRHEGVEDCDGSDFGYLTCETYLPGSYGDLQCTQYCYIDSTPCRYFT

SEQ ID NO: 2845 - protein, 107 aa, Homo sapiens
MENPSPAAALGKALCALLLATLGAAGQPLGGESICSARALAKYSITFTGKWSQTAFPKQYPLFRPPAQWSSLLGKYSPLLASCSTRRAAAPEPPAQLHGGASQSGAC

SEQ ID NO: 2846 - protein, 260 aa, Homo sapiens
VPDFIMGNSCYNIVATLLLVLNFERTRSLQDPCSNCPAGTFCDNNRNQICSPCPPNSFSSAGGQRTCDICRQCKGVFRTRKECSSTSNAECDCTPGFHCLGAGCSMCEQDCKQGQELTKKGCKDCCFGTFNDQKRGICRPWTNCSLDGKSVLVNGTKERDVVCGPSPADLSPGASSVTPPAPAREPGHSPQIISFFLALTSTALLFLLFFLTLRFSVVKRGRKKLLYIFKQPFMRPVQTTQEEDGCSCRFPEEEEGGCEL

SEQ ID NO: 2847 - protein, 149 aa, Homo sapiens
LPVLLLLQLLVRPGLQAPMTQTTPLKTSWVNCSNMIDEIITHLKQPPLPLLDFNNLNGEDQDILMENNLRRPNLEAFNRAVKSLQNASAIESILKNLLPCLPLATAAPTRHPIHIKDGDWNEFRRKLTFYLKTLENAQAQQTTLSLAIF

SEQ ID NO: 2848 - protein, 28 aa, Homo sapiens
ISLLQIFGIFLARTLISDIEAVKAGHHF

SEQ ID NO: 2849 - protein, 96 aa, Homo sapiens
IFILFIIVQLFIMKLRKAHVIWKKENEVSEHTLESYRSRSNNEETSSEEKNGQSSHPMRCMNYITKLYSEAKTKRKENVQHSKLEEKHIQVPESIV

SEQ ID NO: 2850 - protein, 144 aa, Homo sapiens
IVLGLVLLSVTVQGKVFERCELARTLKRLGMDGYRGISLANWMCLAKWESGYNTRATNYNAGDRSTDYGIFQINSRYWCNDGKTPGAVNACHLSCSALLQDNIADAVACAKRVVRDPQGIRAWVAWRNRCQNRDVRQYVQGCGV

SEQ ID NO: 2851 - protein, 12 aa, Homo sapiens
VLPTLTLGLLVH

SEQ ID NO: 2852 - protein, 28 aa, Homo sapiens
LPILAMLMALCVHCHRLPGSYDSTSSDR

SEQ ID NO: 2853 - protein, 57 aa, Homo sapiens
LLFLLFFLTLRFSVVKRGRKKLLYIFKQPFMRPVQTTQEEDGCSCRFPEEEEGGCEL

SEQ ID NO: 2854 - protein, 96 aa, Homo sapiens
KADIFAFGLTLWEMMTLSIPHINLSNDDDDEDKTFDESDFDDEAYYAALGTRPPINMEELDESYQKVIELFSVCTNEDPKDRPSAAHIVEALETDV

SEQ ID NO: 2855 - protein, 45 aa, Homo sapiens
VSPLLGSIAGVFVYQLMIGCHLEQPPPSNEEENVKLAHVKHKEQI

SEQ ID NO: 2856 - protein, 35 aa, Homo sapiens
IFAGLAFIVGLLILLSRRFRCGGNKKRRQINEDEP

SEQ ID NO: 2857 - protein, 10 aa, Homo sapiens
KMAVFALVLV

SEQ ID NO: 2858 - protein, 14 aa, Homo sapiens
LGVLPTLTLGLLVH

SEQ ID NO: 2859 - protein, 64 aa, Homo sapiens
MDYHYIAKSCLLCSLVPCCLPFWPFQNINAAKSSFLPEDEKRELLDLLYKAYGMPPSASAGQNL

SEQ ID NO: 2860 - protein, 11 aa, Homo sapiens
KATICLLPVLL

SEQ ID NO: 2861 - protein, 42 aa, Homo sapiens
KSMYFYLHIISLLIILFLPMKPQAHTQRRPQTLNSINKRKTD

SEQ ID NO: 2862 - protein, 20 aa, Homo sapiens
VVVLLIVVFVYVATRPTITE

SEQ ID NO: 2863 - protein, 165 aa, Homo sapiens
IATHPTAFPATIMFAMKCLSLLKFLMDLGCDGEPCFSCLYGNGPHPPAPQPSSRFNDAPAADKEPSVVQFCEFVSAPEVSRWAGPIIDVLLDYVGNVQLCSRLKEHIDSFEDWAVIKEKAEPPRPLAHLCRLRVRKAIGKYRIKLLDTLPLPGRLIRYLKYENTQ

SEQ ID NO: 2864 - protein, 112 aa, Homo sapiens
KRCDLWSLGVILYILLSGYPPFVGRCGSDCGWDRGEACPACQNMLFESIQEGKYEFPDKDWAHISCAAKDLISKLLVRDAKQRLSAAQVLQHPWVQGCAPENTLPTPMVLQR

SEQ ID NO: 2865 - protein, 189 aa, Homo sapiens
MLLWLLLLILTPGREQSGVAPKAVLLLNPPWSTAFKGEKVALICSSISHSLAQGDTYWYHDEKLLKIKHDKIQITEPGNYQCKTRGSSLSDAVHVEFSPDWLILQALHPVFEGDNVILRCQGKDNKNTHQKVYYKDGKQLPNSYNLEKITVNSVSRDNSKYHCTAYRKFYILDIEVTSKPLNIQVQGNG

SEQ ID NO: 2866 - protein, 280 aa, Homo sapiens
MGTALKLLLGAGAVAYGVRESVFTVEGGHRAIFFNRIGGVQQDTILAEGLHFRIPWFQYPIIYDIRARPRKISSPTGSKDLQMVNISLRVLSRPNAQELPSMYQRLGLDYEERVLPSIVNEVLKSVVAKFNASQLITQRAQVSLLIRRELTERAKDFSLILDDVAITELSFSREYTAAVEAKQVAQQEAQRAQFLVEKAKQEQRQKIVQAEGEAEAAKMLGEALSKNPGYIKLRKIRAAQNISKTIATSQNRIYLTADNLVLNLQDESFTRSDSLIKGKK

SEQ ID NO: 2867 - protein, 81 aa, Homo sapiens
MARGAALALLLFGLLGVLVAAPDGGFDLSDALPDNENKKPTAIPKKPSAGEKGFFLVCKEKEQIIFSDSRTGLRQLERRQK

SEQ ID NO: 2868 - protein, 9 aa, Homo sapiens
ISLFSALLA

SEQ ID NO: 2869 - protein, 953 aa, Homo sapiens
IGQVLTVFFSVLIGAFSVGQASPSIEAFANARGAAYEIFKIIDNKPSIDSYSKSGHKPDNIKGNLEFRNVHFSYPSRKEVKILKGLNLKVQSGQTVALVGNSGCGKSTTVQLMQRLYDPTEGMVSVDGQDIRTINVRFLREIIGVVSQEPVLFATTIAENIRYGRENVTMDEIEKAVKEANAYDFIMKLPHKFDTLVGERGAQLSGGQKQRIAIARALVRNPKILLLDEATSALDTESEAVVQVALDKARKGRTTIVIAHRLSTVRNADVIAGFDDGVIVEKGNHDELMKEKGIYFKLVTMQTAGNEVELENAADESKSEIDALEMSSNDSRSSLIRKRSTRRSVRGSQAQDRKLSTKEALDESIPPVSFWRIMKLNLTEWPYFVVGVFCAIINGGLQPAFAIIFSKIIGVFTRIDDPETKRQNSNLFSLLFLALGIISFITFFLQGFTFGKAGEILTKRLRYMVFRSMLRQDVSWFDDPKNTTGALTTRLANDAAQVKGAIGSRLAVITQNIANLGTGIIISFIYGWQLTLLLLAIVPIIAIAGVVEMKMLSGQALKDKKELEGSGKIATEAIENFRTVVSLTQEQKFEHMYAQSLQVPYRNSLRKAHIFGITFSFTQAMMYFSYAGCFRFGAYLVAHKLMSFEDVLLVFSAVVFGAMAVGQVSSFAPDYAKAKISAAHIIMIIEKTPLIDSYSTEGLMPNTLEGNVTFGEVVFNYPTRPDIPVLQGLSLEVKKGQTLALVGSSGCGKSTVVQLLERFYDPLAGKVLLDGKEIKRLNVQWLRAHLGIVSQEPILFDCSIAENIAYGDNSRVVSQEEIVRAAKEANIHAFIESLPNKYSTKVGDKGTQLSGGQKQRIAIARALVRQPHILLLDEATSALDTESEKVVQEALDKAREGRTCIVIAHRLSTIQNADLIVVFQNGRVKEHGTHQQLLAQKGIYFSMVSVQAGTKRQ

SEQ ID NO: 2870 - protein, 481 aa, Homo sapiens
KDDRCKIPLFMLMSFMPASAVPPFSCGVISTLRSREEGAVDKSYCTLLDCLCSWGQVGHILELVDNWLPTEHAQAKSNTASKGRVQIHDTRPVKPELALVYIEYLLTHPKNRECLLSAPRKKLNHLLKALETSKADLESLLQTPGGKPRGFSEAAAPRAFGLHCRLSIHLQHKFCSEGKVYLSMLEDTGFWLESKILSFIQDQEEDYLKLHRVIYQQIIQTYLTVCKDVVMVGLGDHQFQMQLLQRSLGIMQTVKGFFYVSLLLDILKEITGSSLIQKTDSDEEVAMLLDTVQKVFQKMLECIARSFRKQPEEGLRLLYSVQRPLHEFITAVQSRHTDTPVHRGVLSTLIAGPVVEISHQLRKVSDVEELTPPEHLSDLPPFSRCLIGIIIKSSNVVRSFLDELKACVASNDIEGIVCLTAAVHIILVINAGKHKSSKVREVAATVHRKLKTFMEITLEEDSIERFLYESSSRTLGELLNS

SEQ ID NO: 2871 - protein, 63 aa, Homo sapiens
RGPMSFLAGLGLAVGLALLLYCYPPDPKGLPGTRRVLGFSPVIIDRHVSRYLLAFLADDLGGL

SEQ ID NO: 2872 - protein, 292 aa, Homo sapiens
LAGRLPAGPRGMGTALKLLLGAGAVAYGVRESVFTVEGGHRAIFFNRIGGVQQDTILAEGLHFRIPWFQYPIIYDIRARPRKISSPTGSKDLQMVNISLRVLSRPNAQELPSMYQRLGLDYEERVLPSIVNEVLKSVVAKFNASQLITQRAQVSLLIRRELTERAKDFSLILDDVAITELSFSREYTAAVEAKQVAQQEAQRAQFLVEKAKQEQRQKIVQAEGEAEAAKMLGEALSKNPGYIKLRKIRAAQNISKTIATSQNRIYLTADNLVLNLQDESFTRGSDSLIKGKK

SEQ ID NO: 2873 - protein, 16 aa, Homo sapiens
LASFLLLLFSSLLLCR

SEQ ID NO: 2874 - protein, 429 aa, Homo sapiens
LGLRPPLLALVGLLSLGCVLSQECTKFKVSSCRECIESGPGCTWCQKLNFTGPGDPDSIRCDTRPQLLMRGCAADDIMDPTSLAETQEDHNGGQKQLSPQKVTLYLRPGQAAAFNVTFRRAKGYPIDLYYLMDLSYSMLDDLRNVKKLGGDLLRALNEITESGRIGFGSFVDKTVLPFVNTHPDKLRNPCPNKEKECQPPFAFRHVLKLTNNSNQFQTEVGKQLISGNLDAPEGGLDAMMQVAACPEEIGWRNVTRLLVFATDDGFHFAGDGKLGAILTPNDGRCHLEDNLYKRSNEFDYPSVGQLAHKLAENNIQPIFAVTSRMVKTYEKLTEIIPKSAVGELSEDSSNVVHLIKNAYNVSLPHHSAGTHGVASNLPTAGQLLLQVSRRVVWEESPCPVGQLQPPDLPSGLQDTLARHFHGELWVLSR

SEQ ID NO: 2875 - protein, 523 aa, Homo sapiens [sequence omitted]

SEQ ID NO: 2876 - protein, 65 aa, Homo sapiens [sequence omitted]

SEQ ID NO: 2877 - protein, 194 aa, Homo sapiens
ICFKFLGLLTACRMLLEPGRGCCALAILLAIVDIQSGGCINITSSASQEGTRLNLICTVWHKKEEAEGFVVFLCKDRSGDCSPETSLKQLRLKRDPGIDGVGEISSQLMFTISQVTPLHSGTYQCCARSQKSGIRLQGHFFSILFTETGNYTVTGLKQRQHLEFSHNEGTLSSGFLQEKVWVMLVTSLVALQAL

SEQ ID NO: 2878 - protein, 637 aa, Homo sapiens
KPQRSQLQIFSSVLQTSLLFLLMGLRASGKDSAPTVVSGILGGSVTLPLNISVDTEIENVIWIGPKNALAFARPKENVTIMVKSYLGRLDITKWSYSLCISNLTLNDAGSYKAQINQRNFEVTTEEEFTLFVYEQLQEPQVTMKSVKVSENFSCNITLMCSVKGAEKSVLYSWTPREPHASESNGGSILTVSRTPCDPDLPYICTAQNPVSQRSSLPVHVGQFCTDPGASRGGTTGETVVGVLGEPVTLPLALPACRDTEKVVWLFNTSIISKEREEAATADPLIKSRDPYKNRVWVSSQDCSLKISQLKIEDAGPYHAYVCSEASSVTSMTHVTLLIYRRLRKPKITWSLRHSEDGICRISLTCSVEDGGNTVMYTWTPLQKEAVVSQGESHLNVSWRSSENHPNLTCTASNPVSRSSHQFLSENICSGPERNTKLWIGLFLMVCLLCVGIFSWCIWKRKGRCSVPAFCSSQAEAPADTPEPTAGHTLYSVLSQGYEKLDTPLRPARQQPTPTSDSSSDSNLTTEEDEDRPEVHKPISGRYEVFDQVTQEGAGHDPAPEGQADYDPVTPYVTEVESVVGENTMYAQVFNLQGKTPVSQKEESSATIYCSIRKPQVVPPPQQNDLEIPESPTYENFT

SEQ ID NO: 2879 - protein, 1118 aa, Homo sapiens
ISSLSWFTTIVPLVLVLTITAVKDATDDYFRHKSDNQVNNRQSQVLINGILQQEQWMNVCVGDIIKLENNQFVAADLLLLSSSEPHGLCYIETAELDGETNMKVRQAIPVTSELGDISKLAKFDGEVICEPPNNKLDKFSGTLYWKENKFPLSNQNMLLRGCVLRNTEWCFGLVIFAGPDTKLMQNSGRTKFKRTSIDRLMNTLVLWIFGFLVCMGVILAIGNAIWEHEVGMRFQVYLPWDEAVDSAFFSGFLSFWSYIIILNTVVPISLYVSVEVIRLGHSYFINWDKKMFCMKKRTPAEARTTTLNEELGQVEYIFSDKTGTLTQNIMVFNKCSINGHSYGDVFDVLGHKAELGERPEPVDFSFNPLADKKFLFWDPSLLEAVKIGDPHTHEFFRLLSLCHTVMSEEKNEGELYYKAQSPDEGALVTAARNFGFVFRSRTPKTITVHEMGTAITYQLLAILDFNNIRKRMSVIVRNPEGKIRLYCKGADTILLDRLHHSTQELLNTTMDHLNEYAGEGLRTLVLAYKDLDEEYYEEWAERRLQASLAQDSREDRLASIYEEVENNMMLLGATAIEDKLQQGVPETIALLTLANIKIWVLTGDKQETAVNIGYSCKMLTDDMTEVFIVTGHTVLEVREELRKAREKMMDSSRSVGNGFTYQDKLSSSKLTSVLEAVAGEYALVINGHSLAHALEADMELEFLETACACKAVICCRVTPLQKAQVVELVKKYKKAVTLAIGDGANDVSMIKTAHIGVGISGQEGIQAVLASDYSFSQFKFLQRLLLVHGRWSYLRMCKFLCYFFYKNFAFTMVHFWFGFFCGFSAQTVYDQYFITLYNIVYTSLPVLAMGVFDQDVPEQRSMEYPKLYEPGQLNLLFNKREFFICIAQGIYTSVLMFFIPYGVFADATRDDGTQLADYQSFAVTVATSLVIVVSVQIGLDTGYWTAINHFFIWGSLAVYFAILFAMHSNGLFDMFPNQFRFVGNAQNTLAQPTVWLTIVLTTVVCIMPVVAFRFLRLNLKPDLSDTVRYTQLVRKKQKAQHRCMRRVGRTGSRRSGYAFSHQEGFGELIMSGKNMRLSSLALSSFTTRSSSSWIESLRRKKSDSASSPSGGADKPLKG

SEQ ID NO: 2880 - protein, 366 aa, Homo sapiens
VVTLILLLLLKVYQGKGCQGSADHVVSISGVPLQLQPNSIQTKVDSIAWKKLLPSQNGFHHILKWENGSLPSNTSNDRFSFIVKNLSLLIKAAQQQDSGLYCLEVTSISGKVQTATFQVFVFESLLPDKVEKPRLQGQGKILDRGRCQVALSCLVSRDGNVSYAWYRGSKLIQTAGNLTYLDEEVDINGTHTYTCNVSNPVSWESHTLNLTQDCQNAHQEFRFWPFLVIIVILSALFLGTLACFCVWRRKRKEKQSETSPKEFLTIYEDVKDLKTRRNHEQEQTFPGGGSTIYSMIQSQSSAPTSQEPAYTLYSLIQPSRKSGSRKRNHSPSFNSTIYEVIGKSQPKAQNPARLSRKELENFDVYS

SEQ ID NO: 2881 - protein, 26 aa, Homo sapiens
IGEGVSFFLFFFLEPVLIALNKYSLK

SEQ ID NO: 2882 - protein, 206 aa, Homo sapiens
RTWPCTLLFFLLFIPVFCKAMHVAQPAVVLASSRGIASFVCEYASPGKATEVRVTVLRQADSQVTEVCAATYMMGNELTFLDDSICTGTSSGNQVNLTIQGLRAMDTGLYICKVELMYPPPYYLGIGNGTQIYVIDPEPCPDSDFLLWILAAVSSGLFFYSFLLTAVSLSKMLKKRSPLTTGVYVKMPPTEPECEKQFQPYFIPIN

SEQ ID NO: 2883 - protein, 18 aa, Homo sapiens
IFSLCFFLFQFILNAYFS

SEQ ID NO: 2884 - protein, 825 aa, Homo sapiens
LLGVLLLGAARLPRGAEAFEIALPRESNITVLIKLGTPTLLAKPCYIVISKRHITMLSIKSGERIVFTFSCQSPENHFVIEIQKNIDCMSGPCPFGEVQLQPSTSLLPTLNRTFIWDVKAHKSIGLELQFSIPRLRQIGPGESCPDGVTHSISGRIDATVVRIGTFCSNGTVSRIKMQEGVKMALHLPWFHPRNVSGFSIANRSSIKRLCIIESVFEGEGSATLMSANYPEGFPEDELMTWQFVVPAHLRASVSFLNFNLSNCERKEERVEYYIPGSTTNPEVFKLEDKQPGNMAGNFNLSLQGCDQDAQSPGILRLQFQVLVQHPQNESNKIYVVDLSNERAMSLTIEPRPVKQSRKFVPGCFVCLESRTCSSNLTLTSGSKHKISFLCDDLTRLWMNVEKTISCTDHRYCQRKSYSLQVPSDILHLPVELHDFSWKLLVPKDRLSLVLVPAQKLQQHTHEKPCNTSFSYLVASAIPSQDLYFGSFCPGGSIKQIQVKQNISVTLRTFAPSFQQEASRQGLTVSFIPYFKEEGVFTVTPDTKSKVYLRTPNWDRGLPSLTSVSWNISVPRDQVACLTFFKERSGVVCQTGRAFMIIQEQRTRAEEIFSLDEDVLPKPSFHHHSFWVNISNCSPTSGKQLDLLFSVTLTPRTVDLTVILIAAVGGGVLLLSALGLIICCVKKKKKKTNKGPAVGIYNDNINTEMPRQPKKFQKGRKDNDSHVYAVIEDTMVYGHLLQDSSGSFLQPEVDTYRPFQGTMGVCPPSPPTICSRAPTAKLATEEPPPRSPPESESEPYTFSHPNNGDVSSKDTDIPLLNTQEPMEPAE

SEQ ID NO: 2885 - protein, 86 aa, Homo sapiens
RRMALSVLRLALLLLAVTFAASLIPQFGLFSKYRTPNCSQYRLPGCPRHFNPVCGSDMSTYANECTLCMKIREGGHNIKIIRNGPC

SEQ ID NO: 2886 - protein, 13 aa, Homo sapiens
IIAGINFKLLFLF

SEQ ID NO: 2887 - protein, 36 aa, Homo sapiens
ISGRLWLATLGSACLRLSQPPRPCVVSSWVSERAGW

SEQ ID NO: 2888 - protein, 130 aa, Homo sapiens
LHLSLLALGAAYVYAIPTEIPTSALVKETLALLSTHRTLLIANETLRIPVPVHKNHQLCTEEIFQGIGTLESQTVQGGTVERLFKNLSLIKKYIDGQKKKCGEERRRVNQFLDYLQEFLGVMNTEWIIES

SEQ ID NO: 2889 - protein, 331 aa, Homo sapiens
RPDTAQLDGTMAPAFLLLLLLWPQGCVSGPSADSVYTKVRLLEGETLSVQCSYKGYKNRVEGKVWCKIRKKKCEPGFARVWVKGPRYLLQDDAQAKVVNITMVALKLQDSGRYWCMRNTSGILYPLMGFQLDVSPAPQTERNIPFTHLDNILKSGTVTTGQAPTSGPDAPFTTGVMVFTPGLITLPRLLASTRPASKTGYSFTATSTTSQGPRRTMGSQTVTASPSNARDSSAGPESISTKSGDLSTRSPTTGLCLTSRSLLNRLPSMPSIRHQDVYSTVLGVVLTLLVLMLIMVYGFWKKRHMASYSMCSDPSTRDPPGRPEPYVEVYLI

SEQ ID NO: 2890 - protein, 944 aa, Homo sapiens
LPPCSGPGWLLSLSALLSVAARGAFATTHWVVTEDGKIQQQVDSPMNLKHPHDLVILMRQEATVNYLKELEKQLVAQKIHIEENEDRDTGLEQRHNKEDPDCIKAKVPLGDLDLYDGTYITLESKDISPEDYIDTESPVPPDPEQPDCTKILELPYSIHAFQHLRGVQERVNLSAPLLPKEDPIFTYLSKRLGRSIDDIGHLIHEGLQKNTSSWVLYNMASFYWRIKNEPYQVVECAMRALHFSSRHNKDIALVNLANVLHRAHFSADAAVVVHAALDDSDFFTSYYTLGNIYAMLGEYNHSVLCYDHALQARPGFEQAIKRKHAVLCQQKLEQKLEAQHRSLQRTLNELKEYQKQHDHYLRQQEILEKHKLIQEEQILRNIIHETQMAKEAQLGNHQICRLVNQQHSLHCQWDQPVRYHRGDIFENVDYVQFGEDSSTSSMMSVNFDVQSNQSDINDSVKSSPVAHSILWIWGRDSDAYRDKQHILWPKRADCTESYPRVPVGGELPTYFLPPENKGLRIHELSSDDYSTEEEAQTPDCSITDFRKSHTLSYLVKELEVRMDLKAKMPDDHARKILLSRINNYTIPEEEIGSFLFHAINKPNAPIWLILNEAGLYWRAVGNSTFAIACLQRALNLAPLQYQDVPLVNLANLLIHYGLHLDATKLLLQALAINSSEPLTFLSLGNAYLALKNISGALEAFRQALKLTTKCPECENSLKLIRCMQFYPFLYNITSSVCSGNCHEKTLDNSHDKQKYFDNSQSLDAAEEEPSERGTEEDPVFSVENSGRDSDALRLESTVVEESNGSDEMENSDETKMSEEILALVDEFQQAWPLEGFGGALEMKGRRLDLQGIRVLKKGPQDGVARSSCYGDCRSEDDEATEWITFQVKRVKKPKGDHKKTPGKKVETGQIENGHRYQANLEITGPKVASPGPQGLLDWKTRKVP

SEQ ID NO: 2891 - protein, 756 aa, Homo sapiens
LLRLLLAWAAAGPTLGQDPWAAEPRAACGPSSCYALFPRRRTFLEAWRACRELGGDLATPRTPEEAQRVDSLVGAGPASRLLWIGLQRQARQCQLQRPLRGFTWTTGDQDTAFTNWAQPASGGPCPAQRCVALEASGEHRWLEGSCTLAVDGYLCQFGFEGACPALQDEAGQAGPAVYTTPFHLVSTEFEWLPFGSVAAVQCQAGRGASLLCVKQPEGGVGWSRAGPLCLGTGCSPDNGGCEHECVEEVDGHVSCRCTEGFRLAADGRSCEDPCAQAPCEQQCEPGGPQGYSCHCRLGFRPAEDDPHRCVDTDECQIAGVCQQMCVNYVGGFECYCSEGHELEADGISCSPAGAMGAQASQDLGDELLDDGEDEEDEDEAWKAFNGGWTEMPGILWMEPTQPPDFALAYRPSFPEDREPQIPYPEPTWPPPLSAPRVPYHSSVLSVTRPVVVSATHPTLPSAHQPPVIPATHPALSRDHQIPVIAANYPDLPSAYQPGILSVSHSAQPPAHQPPMISTKYPELFPAHQSPMFPDTRVAGTQTTTHLPGIPPNHAPLVTTLGAQLPPQAPDALVLRTQATQLPIIPTAQPSLTTTSRSPVSPAHQISVPAATQPAALPTLLPSQSPTNQTSPISPTHPHSKAPQIPREDGPSPKLALWLPSPAPTAAPTALGEAGLAEHSQRDDRWLLVALLVPTCVFLVVLLALGIVYCTRCGPHAPNKRITDCYRWVIHAGSKSPTEPMPPRGSLTGVQTCRTSV

SEQ ID NO: 2892 - protein, 185 aa, Homo sapiens
LKLSCAGIILLVLVVTGLSVSVTSLIQKSSIEKCSVDIQQSRNKTTERPGLLNCPIYWQQLREKCLLFSHTVNPWNNSLADCSTKESSLLLIRDKDELIHTQNLIRDKAILFWIGLNFSLSEKNWKWINGSFLNSNDLEIRGDAKENSCISISQTSVYSEYCSTEIRWICQKELTPVRNKVYPDS

SEQ ID NO: 2893 - protein, 167 aa, Homo sapiens
TMKYTSYILAFQLCIVLGSLGCYCQDPYVKEAENLKKYFNAGHSDVADNGTLFLGILKNWKEESDRKIMQSQIVSFYFKLFKNFKDDQSIQKSVETIKEDMNVKFFNSNKKKRDDFEKLTNYSVTDLNVQRKAIHELIQVMAELSPAAKTGKRKRSQMLFRGRRASQ

SEQ ID NO: 2894 - protein, 27 aa, Homo sapiens
LSGYPDKSGLVFLMLPLLVLSSLSAKC

SEQ ID NO: 2895 - protein, 57 aa, Homo sapiens
VLPVQLFFVWIIMQQLLKPSSFIRLMQNSVILIPPRKEQAQLTLRTRKVPPTTPALR

SEQ ID NO: 2896 - protein, 104 aa, Homo sapiens
KAQARPEDMQIITTALVCLLLAGMWPEDVDSKSMQVPFSRCCFSFAEQEIPLRAILCYRNTSSICSNEGLIFKLKRGKEACALDTVGWVQRHRKMLRHCPSKRK

SEQ ID NO: 2897 - protein, 18 aa, Homo sapiens
IYLMLLVFFGDLQGKEAG

SEQ ID NO: 2898 - protein, 61 aa, Homo sapiens
VAFGSSTFALVPVFAHLSILQSLVPAAGAASPVAISAQHLCYSHVTPGDPGAGAGQGPAPS

SEQ ID NO: 2899 - protein, 180 aa, Homo sapiens
IAILLFILLWHLCWPKEKADPYPYPGLVCGVPNTHTPSSSHLSSPGALETGDTWKEASLLPLLSRELSSLASQPLSRLLDELEVLEELIVLLDPEPGPGGGMAHGTTRHLAARYGLPAAWSTFAYSLRPSRSPLRALIEMVVAREPSASLGQLGTHLAQLGRADALRVLSKLGSSGVCWA

SEQ ID NO: 2900 - protein, 14 aa, Homo sapiens
LPAALLLLLLLWDR

SEQ ID NO: 2901 - protein, 85 aa, Homo sapiens
RMALSVLRLALLLLAVTFAASLIPQFGLFSKYRTPNCSQYRLPGCPRHFNPVCGSDMSTYANECTLCMKIREGGHNIKIIRNGPC

SEQ ID NO: 2902 - protein, 124 aa, Homo sapiens
IATGILFPVLYKLATSPLDRQRKEDRKSEDQKALLSSSGLNEYEEENEEEDAEKWNEMDFEMIETNDTMRHSIIETSRSSLTEPTAEVYNQYPSNALVFESSPFNTGSAHVKHLPETRTKGTNV

SEQ ID NO: 2903 - protein, 32 aa, Homo sapiens
IVHFLFFFLGSLLFKKYPCVFQLNHPFIFKPS

SEQ ID NO: 2904 - protein, 27 aa, Homo sapiens
LKPAFVNYFFLLLLEVSHLLLIINADV

SEQ ID NO: 2905 - protein, 920 aa, Homo sapiens
LLLFLHALFKMIDLSFLTEEEQEAIMKVLQRDAALKRAEEERVRHLPEKIKDDQQLKNMSGQWFYEAKAKRHRDKIHGADIIRASMRKKRPQIAAEQSKDRENGAKESWVNNVNKDAFLPPELAGVVEEPEEDAAPASPSSSVVNPASSVIDMSQENTRKPNVSPEKRKNPFNSSKLPEGHSSQQTKNEQSKNGRTGLFQTSKEDELSESKEKSTVADTSIQKLEKSKQTLPGLSNGSQIKAPIPKARKMIYKSTDLNKDDNQSFPRQRTDSLKARGAPRGILKRNSSSSSTDSETLRYNHNFEPKSKIVSPGLTIHERISEKEHSLEDNSSPNSLEPLKHVRFSAVKDELPQSPGLIHGREVGEFSVLESDRLKNGMEDAGDTEEFQSDPKPSQYRKPSLFHQSTSSPYVSKSETHQPMTSGSFPINGLHSHSEVLTARPQSMENSPTINEPKDKSSELTRLESVLPRSPADELSHCVEPEPSQVPGGSSRDRQQGSEEEPSPVLKTLERSAARKMPSKSLEDISSDSSNQAKVDNQPEELVRSAEDDEKPDQKPVTNECVPRISTVPTQPDNPFSHPDKLKRMSKSVPAFLQDEVSGSVMSVYSGDFGNLEVKGNIQFAIEYVESLKELHVFVAQCKDLAAADVKKQRSDPYVKAYLLPDKGKMGKKKTLVVKKTLNPVYNEILRYKIEKQILKTQKLNLSIWHRDTFKRNSFLGEVELDLETWDWDNKQNKQLRWYPLKRKTAPVALEAENRGEMKLALQYVPEPVPGKKLPTTGEVHIWVKECLDLPLLRGSHLNSFVKCTILPDTSRKSRQKTRAVGKTTNPIFNHTMVYDGFRPEDLMEACVELTVWDHYKLTNQFLGGLRIGFGTGKSYGTEVDWMDSTSEEVALWEKMVNSPNTWIEATLPLRMLLIAKISK

SEQ ID NO: 2906 - protein, 160 aa, Homo sapiens
IVAVYCPVIAAVFIVLKMVNYRLHRALDAGEVVDRTANEFTDQRTKAEQGNCSTRRKDSNGPSDPGGGIEMSEFIREATPPVGCSSRNSYAGLDPSNQIGSGSSRLGTAATIKGDTDTAKTSDDISLSLGQSSSLCKEGSEEQGKNVILYHDVIYCGDQS

SEQ ID NO: 2907 - protein, 450 aa, Homo sapiens
MTLGIYLQLFFLSIVSQPTFINSVLPISAALPSLDQKKRGGHKACCLLTPPPPPLFPPPFFRGGRSPLLSPDMKNLMLELETSQSPCMQGSLGSPGPPGPQGPPGLPGKTGPKGEKGELGRPGRKGRPGPPGVPGMPGPIGWPGPEGPRGEKGDLGMMGLPGSRGPMGSKGYPGSRGEKGSRGEKGDLGPKGEKGFPGFPGMLGQKGEMGPKGEPGIAGHRGPTGRPGKRGKQGQKGDSGVMGPPGKPGPSGQPGRPGPPGPPPAGQLIMGPKGERGFPGPPGRCLCGPTMNVNNPSYGESVYGPSSPRVPVIFVVNNQEELERLNTQNAIAFRRDQRSLYFKDSLGWLPIQLTPFYPVDYTADQHGTCGDGLLQPGEECDDGNSDVGDDCIRDCHRAYCGDGHRHEGVEDCDGSDFGYLTCETYLPGSYGDLQCTQYCYIDSTPCRYFT

SEQ ID NO: 2908 - protein, 76 aa, Homo sapiens
LTVVLLAVAACVLLLTSAQLGLHIWQLRSQCMWPRETQLLLEVPPSTEDARSCQFPEEERGERSAEEKGRLGDLWV

SEQ ID NO: 2909 - protein, 16 aa, Homo sapiens
LFTQFMGVVMFITLLG

SEQ ID NO: 2910 - protein, 222 aa, Homo sapiens
VAGATSLVTLLLAVPITVLAVLALVPQDQGGLVTETADPGAQAQQGLGFQKLPEEEPETDLSPGLPAAHLIGAPLKGQGLGWETTKEQAFLTSGTQFSDAEGLALPQDGLYYLYCLVGYRGRAPPGGGDPQGRSVTLRSSLYRAGGAYGPGTPELLLEGAETVTPVLDPARRQGYGPLWYTSVGFGGLVQLRRGERVYVNISHPDMVDFARGKTFFGAVMVG

SEQ ID NO: 2911 - protein, 196 aa, Homo sapiens
ILPFLYLGSAYHAARRDMLDALGITALLNVSSDCPNHFEGHYQYKCIPVEDNHKADISSWFMEAIEYIDAVKDCRGRVLVHCQAGISRSATICLAYLMMKKRVRLEEAFEFVKQRRSIISPNFSFMGQLLQFESQVLATSCAAEAASPSGPLRERGKTPATPTSQFVFSFPVSVGVHSAPSSLPYLHSPITTSPSC

SEQ ID NO: 2912 - protein, 10 aa, Homo sapiens
IVVLFSSLAV

SEQ ID NO: 2913 - protein, 47 aa, Homo sapiens
LLQYCFLLITCLLTALEAVPIDIDKTKVQNIHPVESAKIEPPVSEMK

SEQ ID NO: 2914 - protein, 18 aa, Homo sapiens
VLLIVVFVYVATRPTITE

SEQ ID NO: 2915 - protein, 178 aa, Homo sapiens
ILLFILLWHLCWPKEKADPYPYPGLVCGVPNTHTPSSSHLSSPGALETGDTWKEASLLPLLSRELSSLASQPLSRLLDELEVLEELIVLLDPEPGPGGGMAHGTTRHLAARYGLPAAWSTFAYSLRPSRSPLRALIEMVVAREPSASLGQLGTHLAQLGRADALRVLSKLGSSGVCWA

SEQ ID NO: 2916 - protein, 33 aa, Homo sapiens
INYFFFLKLFLSLQNLILALDLRRESLTRDETQ

SEQ ID NO: 2917 - protein, 18 aa, Homo sapiens
ITKVVFPEQGLAILLWMC

SEQ ID NO: 2918 - protein, 80 aa, Homo sapiens
IGLCICFFCSSGCIFLGSPPQNSTAVTPAVLWEESEIMQKELKLLQYQLSQHQELLLKQLAEGRQAQVGSWKDLHSCCPI

SEQ ID NO: 2919 - protein, 361 aa, Homo sapiens
VVTLILLLLLKVYQGKGCQGSADHVVSISGVPLQLQPNSIQTKVDSIAWKKLLPSQNGFHHILKWENGSLPSNTSNDRFSFIVKNLSLLIKAAQQQDSGLYCLEVTSISGKVQTATFQVFVFDKVEKPRLQGQGKILDRGRCQVALSCLVSRDGNVSYAWYRGSKLIQTAGNLTYLDEEVDINGTHTYTCNVSNPVSWESHTLNLTQDCQNAHQEFRFWPFLVIIVILSALFLGTLACFCVWRRKRKEKQSETSPKEFLTIYEDVKDLKTRRNHEQEQTFPGGGSTIYSMIQSQSSAPTSQEPAYTLYSLIQPSRKSGSRKRNHSPSFNSTIYEVIGKSQPKAQNPARLSRKELENFDVYS

SEQ ID NO: 2920 - protein, 63 aa, Homo sapiens
LLEPLWLLSAEWKRVLLFVSLAMALQLSREQGITLRGSAEIVAEFFLHPEKSLRKLSRMKSVQ

SEQ ID NO: 2921 - protein, 12 aa, Homo sapiens
IAGINFKLLFLF

SEQ ID NO: 2922 - protein, 428 aa, Homo sapiens
LLARLLLCVLVVSDSKGSNELHQVPSNCDCLNGGTCVSNKYFSNIHWCNCPKKFGGQHCEIDKSKTCYEGNGHFYRGKASTDTMGRPCLPWNSATVLQQTYHAHRSDALQLGLGKHNYCRNPDNRRRPWCYVQVGLKLLVQECMVHDCADGKKPSSPPEELKFQCGQKTLRPRFKIIGGEFTTIENQPWFAAIYRRHRGGSVTYVCGGSLISPCWVISATHCFIDYPKKEDYIVYLGRSRLNSNTQGEMKFEVENLILHKDYSADTLAHHNDIALLKIRSKEGRCAQPSRTIQTICLPSMYNDPQFGTSCEITGFGKENSTDYLYPEQLKMTVVKLISHRECQQPHYYGSEVTTKMLCAADPQWKTDSCQGDSGGPLVCSLQGRMTLTGIVSWGRGCALKDKPGVYTRVSHFLPWIRSHTKEENGLAL

SEQ ID NO: 2923 - protein, 41 aa, Homo sapiens
LLIFFSWCVWWLFLSVEGKRRYHPRLSPTPLQNGFSDTPAV

SEQ ID NO: 2924 - protein, 596 aa, Homo sapiens
VLALALALALALALSDSRVLWAPAEAHPLSPQGHPARLHRIVPRLRDVFGWGNLTCPICKGLFTAINLGLKKEPNVARVGSVAIKLCNLLKIAPPAVCQSIVHLFEDDMVEVWRRSVLSPSEACGLLLGSTCGHWDIFSSWNISLPTVPKPPPKPPSPPAPGAPVSRILFLTDLHWDHDYLEGTDPDCADPLCCRRGSGLPPASRPGAGYWGEYSKCDLPLRTLESLLSGLGPAGPFDMVYWTGDIPAHDVWHQTRQDQLRALTTVTALVRKFLGPVPVYPAVGNHESTPVNSFPPPFIEGNHSSRWLYEAMAKAWEPWLPAEALRTLRIGGFYALSPYPGLRLISLNMNFCSRENFWLLINSTDPAGQLQWLVGELQAAEDRGDKVHIIGHIPPGHCLKSWSWNYYRIVARYENTLAAQFFGHTHVDEFEVFYDEETLSRPLAVAFLAPSATTYIGLNPGYRVYQIDGNYSGSSHVVLDHETYILNLTQANIPGAIPHWQLLYRARETYGLPNTLPTAWHNLVYRMRGDMQLFQTFWFLYHKGHPPSEPCGTPCRLATLCAQLSARADSPALCRHLMPDGSLPEAQSLWPRPLFC

SEQ ID NO: 2925 - protein, 25 aa, Homo sapiens
LTAVLLSVLLYQWILCQEPAPSFPQ

SEQ ID NO: 2926 - protein, 155 aa, Homo sapiens
ICLILMASVVTIVVIPSTLIQRHNNSSLNTRTQKARHCGHCPEEWITYSNSCYYIGKERRTWEESLLACTSKNSSLLSIDNEEEMKFLSIISPSSWIGVFRNSSHHPWVTMNGLAFKHEIKDSDNAELNCAVLQVNRLKSAQCGSSIIYHCKHKL

SEQ ID NO: 2927 - protein, 87 aa, Homo sapiens
TLKMKGWGWLALLLGALLGTAWARRSQDLHCGACRALVDELEWEIAQVDPKKTIQMGSFRINPDGSQSVVEVTVTVPPNKVAHSGFG

SEQ ID NO: 2928 - protein, 189 aa, Homo sapiens
KRQLGRLLLLLRVLDPLLCDFLDSQDSGSLCFCFRWLLIWFKREFPFPDVLRLWEVLWTGLPGPNLHLLVACAILDMERDTLMLSGFGSNEILKHINELTMKLSVEDVLTRAEALHRQLTACPELPHNVQEILGLAPPAEPHSPSPTASPLPLSPTRAPPTPPPSTDTAPQPDSSLEILPEEEDEGADS

SEQ ID NO: 2929 - protein, 689 aa, Homo sapiens
LICCRMGLSAAAPLWGPPGLLLAIALHPALSVPPRRDYCVLGAGPAGLQMAYFLQRAGRDYAVFERAPRPGSFFTRYPRHRKLISINKRYTGKANAEFNLRHDWNSLLSHDPRLLFRHYSRAYFPDARDMVRYLGDFADTLGLRVQYNTTIAHVTLDKDRQAWNGHYFILTDQKGQVHQCSVLFVATGLSVPNQVDFPGSEYAEGYESVSVDPEDFVGQNVLILGRGNSAFETAENILGVTNFIHMLSRSRVRLSWATHYVGDLRAINNGLLDTYQLKSLDGLLESDLTDLAILKDSKGKFHVTPKFFLEEANTNQSADSITLPQDDNDNFAMRVPYDRVIRCLGWNFDFSIFNKSLRLNSGNAFGKKYPLIRASYESKGSRGLFILGTASHSVDYRKSAGGFIHGFRYTVRAVHRLLEHRHHSVTWPATELPITQLTSSIVRRVNEASGLYQMFGVLADVILLKENSTAFEYLEEFPIQMLAQLETLTGRKAKHGLFVINMEYGRNFSGPDKDVFFDDRSVGHTEDAWQSNFLHPVIYYYRYLPTEQEVRFRPAHWPLPRPTAIHHIVEDFLTDWTAPIGHILPLRRFLENCLDTDLRSFYAESCFLFALTRQKLPPFCQQGYLRMQGLVSTESLWQHRVESRLLRDYAPTGRRLEDSSQQLGDQEPLGSPLAPGPLAQSVDSNKEEL

SEQ ID NO: 2930 - protein, 41 aa, Homo sapiens
MLPTLTAPTLALLLLPKISCLLTSTHPRTQGSRAHFPRAWR

SEQ ID NO: 2931 - protein, 23 aa, Homo sapiens
KRNFKARRSCLLVIMLLTRTETV

SEQ ID NO: 2932 - protein, 283 aa, Homo sapiens
RQGTSPSKCPYLNFFQLLVLAGLSHFCSGVIHVTKEVKEVATLSCGHNVSVEELAQTRIYWQKEKKMVLTMMSGDMNIWPEYKNRTIFDITNNLSIVILALRPSDEGTYECVVLKYEKDAFKREHLAEVTLSVKADFPTPSISDFEIPTSNIRRIICSTSGGFPEPHLSWLENGEELNAINTTVSQDPETELYAVSSKLDFNMTTNHSFMCLIKYGHLRVNQTFNWNTTKQEHFPDNLLPSWAITLISVNGIFVICCLTYCFAPRCRERRRNERLRRESVRPV

SEQ ID NO: 2933 - protein, 152 aa, Homo sapiens
IVICLMVIFLGTLVHKSSSQGQDRHMIRMRQLIDIVDQLKNYVNDLVPEFLPAPEDVETNCEWSAFSCFQKAQLKSANTGNNERIINVSIKKLKRKPPSTNAGRRQKHRLTCPSCDSYEKKPPKEFLERFKSLLQKMIHQHLSSRTHGSEDS

SEQ ID NO: 2934 - protein, 187 aa, Homo sapiens
LCLVFTVATIMVLVVQRTDSIPNSPDNVPLKGGNCSEDLLCILKRAPFKKSWAYLQVAKHLNKTKLSWNKDGILHGVRYQDGNLVIQFPGLYFIICQLQFLVQCPNNSVDLKLELLINKHIKKQALVTVCESGMQTKHVYQNLSQFLLDYLQVNTTISVNVDTFQYIDTSTFPLENVLSIFLYSNSD

SEQ ID NO: 2935 - protein, 52 aa, Homo sapiens
LMIIIVIVVVLFQHYRKKRWAERAHKVVEIKSKEEERLNQEKKVSVYLEDTD

SEQ ID NO: 2936 - protein, 163 aa, Homo sapiens
IICIVLMATVLKTIVLIPFLEQNNFSPNTRTQKARHCGHCPEEWITYSNSCYYIGKERRTWEESLQACASKNSSSLLCIDNEEEMKFLASILPSSWIGVFRNSSHHPWVTINGLAFKHEIKDSDHAERNCAMLHVRGLISDQCGSSRIIRRGFIMLTRLVLNS

SEQ ID NO: 2937 - protein, 180 aa, Homo sapiens
IICIVLMATVLKTIVLIPFLEQNNSSPNARTQKARHCGHCPEEWITYSNSCYYIGKERRTWEESLQACASKNSSSLLCIDNEEEMKFLASILPSSWIGVFRNSSHHPWVTINGLAFKHEIKDSDHAERNCAMLHVRGLISDQCGSSRIIVSISFRIKALELAVHQIKFYICSNRNDIMIA

SEQ ID NO: 2938 - protein, 99 aa, Homo sapiens
VVFSLFLICAMAGDVVYADIKTVRTSPLELAFPLQRSVSFNFSTVHKSCPAKDWKVHKGKCYWIAETKKSWNKSQNDCAINNSYLMVIQDITAMVRFNI

SEQ ID NO: 2939 - protein, 14 aa, Homo sapiens
LASFPLSVLVLLTS

SEQ ID NO: 2940 - protein, 14 aa, Homo sapiens
LNLHKFACFCLLLS

SEQ ID NO: 2941 - protein, 536 aa, Homo sapiens
MVVILGASNILWIMFAASQAFKIETTPESRYLAQIGDSVSLTCSTTGCESPFFSWRTQIDSPLNGKVTNEGTTSTLTMNPVSFGNEHSYLCTATCESRKLEKGIQVEIYSFPKDPEIHLSGPLEAGKPITVKCSVADVYPFDRLEIDLLKGDHLMKSQEFLEDADRKSLETKSLEVTFTPVIEDIGKVLVCRAKLHIDEMDSVPTVRQAVKELQVYISPKNTVISVNPSTKLQEGGSVTMTCSSEGLPAPEIFWSKKLDNGNLQHLSGNATLTLIAMRMEDSGIYVCEGVNLIGKNRKEVELIVQVAPRDTTVLVSPSSILEEGSSVNMTCLSQGFPAPKILWSRQLPNGELQPLSENATLTLISTKMEDSGVYLCEGINQAGRSRKEVELIIQVTPKDIKLTAFPSESVKEGDTVIISCTCGNVPETWIILKKKAETGDTVLKSIDGAYTIRKAQLKDAGVYECESKNKVGSQLRSLTLDVQGRENNKDYFSPELLVLYFASSLIIPAIGMIIYFARKANMKGSYSLVEAQKSKV

SEQ ID NO: 2942 - protein, 304 aa, Homo sapiens
MPCLEAVALILLILLVPDPPRGAAETQGEGAVGGFRSSWCEDVRYLGKNWSFVWSTLGVTAMAFVTGALGFWAPKFLLEARVVHGLQPPCFQEPCSNPDSLIFGALTIMTGVIGVILGAEAARRYKKVIPGAEPLICASSLLATAPCLYLALVLAPTTLLASYVFLGLGELLLSCNWAVVADILLSVVVPRCRGTAEALQITVGHILGDAGSPYLTGLISSVLRARRPDSYLQRFRSLQQSFLCCAFVIALGGGCFLLTALYLERDETRAWQPVTGTPDSNDVDSNDLERQGLLSGAGASTEEP

SEQ ID NO: 2943 - protein, 57 aa, Homo sapiens
ITMIHVFYSKVLNMGVSFFYSLSLMTQQKRNCRPWDNQHLNKLYNYFFKLSYRVIRL

SEQ ID NO: 2944 - protein, 74 aa, Homo sapiens
LLILTILTIWLFKNHRFRFLHETGGAMVYDKPPKFAMSREQMSQSCSHTAHNASLLTDAGPLSCGESRASCLFL

SEQ ID NO: 2945 - protein, 268 aa, Homo sapiens
LILVVVLAVVVPRWRQQWSGPGTTKRFPETVLARCVKYTEIHPEMRHVDCQSVWDAFKGAFISKHPCNITEEDYQPLMKLGTQTVPCNKILLWSRIKDLAHQFTQVQRDMFTLEDTLLGYLADDLTWCGEFNTSKINYQSCPDWRKDCSNNPVSVFWKTVSRRFAEAACDVVHVMLNGSRSKIFDKNSTFGSVEVHNLQPEKVQTLEAWVIHGGREDSRDLCQDPTIKELESIISKRNIQFSCKNIYRPDKFLQCVKNPEDSSCTSEI

SEQ ID NO: 2946 - protein, 62 aa, Homo sapiens
LKRGFAMILGTGMMNGTILSKWLPQTHPWPEVDFSTTHWKKYTYLSFATSSEGQSLSFQTKC

SEQ ID NO: 2947 - protein, 93 aa, Homo sapiens
IFAFGLTLWEMMTLSIPHINLSNDDDDEDKTFDESDFDDEAYYAALGTRPPINMEELDESYQKVIELFSVCTNEDPKDRPSAAHIVEALETDV

SEQ ID NO: 2948 - protein, 101 aa, Homo sapiens
TWFCLLRPLFALSFHFLQRASRMAHKQIYYSDKYFDEHYEYRHVMLPRELSKQVPKTHLMSEEEWRRLGVQQSLGWVHYMIHEPEPHILLFRRPLPKDQQK

SEQ ID NO: 2949 - protein, 21 aa, Homo sapiens
ISITLRFLLLMRTLSAYAKKF

SEQ ID NO: 2950 - protein, 19 aa, Homo sapiens
ICFCFSFIIGVLYLVLRKK

SEQ ID NO: 2951 - protein, 410 aa, Homo sapiens
LQLLLLLILLGPGNSLQLWDTWADEAEKALGPLLARDRRQATEYEYLDYDFLPETEPPEMLRNSTDTTPLTGPGTPESTTVEPAARRSTGLDAGGAVTELTTELANMGNLSTDSAAMEIQTTQPAATEAQTTQPVPTEAQTTPLAATEAQTTRLTATEAQTTPLAATEAQTTPPAATEAQTTQPTGLEAQTTAPAAMEAQTTAPAAMEAQTTPPAAMEAQTTQTTAMEAQTTAPEATEAQTTQPTATEAQTTPLAAMEALSTEPSATEALSMEPTTKRGLFIPFSVSSVTHKGIPMAASNLSVNYPVGAPDHISVKQCLLAILILALVATIFFVCTVVLAVRLSRKGHMYPVRNYSPTEMVCISSLLPDGGEGPSATANGGLSKAKSPGLTPEPREDREGDDLTLHSFLP

SEQ ID NO: 2952 - protein, 67 aa, Homo sapiens
VGRAHLFFLSVICFLFMAERTFEMRPSLQVVMRLVDCAVTVEISPVLPLRRWDLTKGNVREILMAQV

SEQ ID NO: 2953 - protein, 248 aa, Homo sapiens
KMQPILLLLAFLLLPRADAGEIIGGHEAKPHSRPYMAYLMIWDQKSLKRCGGFLIRDDFVLTAAHCWGSSINVTLGAHNIKEQEPTQQFIPVKRPIPHPAYNPKNFSNDIMLLQLERKAKRTRAVQPLRLPSNKAQVKPGQTCSVAGWGQTAPLGKHSHTLQEVKMTVQEDRKCESDLRHYYDSTIELCVGDPEIKKTSFKGDSGGPLVCNKVAQGIVSYGRNNGMPPRACTKVSSFVHWIKKTMKRY

SEQ ID NO: 2954 - protein, 11 aa, Homo sapiens
RCRALFLVFII

SEQ ID NO: 2955 - protein, 29 aa, Homo sapiens
ILCILMCMILRFKKGFASEAGSVCIKNDL

SEQ ID NO: 2956 - protein, 13 aa, Homo sapiens
ITHLILCVFIIKL

SEQ ID NO: 2957 - protein, 44 aa, Homo sapiens
IYFCIHFLALAALGLGLALGGGSPSRRKAASQPTSLAPEKLREE

SEQ ID NO: 2958 - protein, 59 aa, Homo sapiens
LLLSLWALCTACRRPEDAVAPRKRARRQRARLQGSATAAEAQVGHQTARAAPGPAQQQG

SEQ ID NO: 2959 - protein, 18 aa, Homo sapiens
TGMTVAGVVLLGSLFSRK

SEQ ID NO: 2960 - protein, 42 aa, Homo sapiens
MFSFSTSHVMLLLQDTALLVLPCTILPMTRGLASYCILRTSS

SEQ ID NO: 2961 - protein, 129 aa, Homo sapiens
MLLWTAVLLFVPCVGKTVWLYLQAWPNPVFEGDALTLRCQGWKNTPLSQVKFYRDGKFLHFSKENQTLSMGAATVQSRGQYSCSGQVMYIPQTFTQTSETAMVQVQGESPAWEFVGQEVLLKGPVSRGQ

SEQ ID NO: 2962 - protein, 78 aa, Homo sapiens
MYGKSSTRAVLLLLGIQLTALWPIAAVEIYTSRVLEAVNGTDARLKCTFSSFAPVGDALTVTWNFRPLDGGPEQFYFS

SEQ ID NO: 2963 - protein, 719 aa, Homo sapiens
MKLLLALAGLLAILATPQPSEGAAPAVLGEVDTSLVLSSMEEAKQLVDKAYKERRESIKQRLRSGSASPMELLSYFKQPVAATRTAVRAADYLHVALDLLERKLRSLWRRPFNVTDVLTPAQLNVLSKSSGCAYQDVGVTCPEQDKYRTITGMCNNRRSPTLGASNRAFVRWLPAEYEDGFSLPYGWTPGVKRNGFPVALARAVSNEIVRFPTDQLTPDQERSLMFMQWGQLLDHDLDFTPEPAARASFVTGVNCETSCVQQPPCFPLKIPPNDPRIKNQADCIPFFRSCPACPGSNITIRNQINALTSFVDASMVYGSEEPLARNLRNMSNQLGLLAVNQRFQDNGRALLPFDNLHDDPCLLTNRSARIPCFLAGDTRSSEMPELTSMHTLLLREHNRLATELKSLNPRWDGERLYQEARKIVGAMVQIITYRDYLPLVLGPTAMRKYLPTYRSYNDSVDPRIANVFTNAFRYGHTLIQPFMFRLDNRYQPMEPNPRVPLSRVFFASWRVVLEGGIDPILRGLMATPAKLNRQNQIAVDEIRERLFEQVMRIGLDLPALNMQRSRDHGLPGYNAWRRFCGLPQPETVGQLGTVLRNLKLARKLMEQYGTPNNIDIWMGGVSEPLKRKGRVGPLLACIIGTQFRKLRDGDRFWWENEGVFSMQQRQALAQISLPRIICDNTGITTVSKNNIFMSNSYPRDFVNCSTLPALNLASWREAS

SEQ ID NO: 2964 - protein, 225 aa, Homo sapiens
MRLHLLLLLALCGAGTTAAELSYSLRGNWSICNGNGSLELPGAVPGCVHSALFQQGLIQDSYYRFNDLNYRWVSLDNWTYSKEFKIPFEISKWQKVNLILEGVDTVSKILFNEVTIGETDNMFNRYSFDITNVVRDVNSIELRFQSAVLYAAQQSKAHTRYQVPPDCPPLVQKGECHVNFVRKEQCSFSWDWGPSFPTQGIWKDVRIEAYNICHLNYFTFSPIYE

SEQ ID NO: 2965 - protein, 79 aa, Homo sapiens
LLLIAFIFLIIKSYRKYHSKPQAPDPHSDPPAKLSSIPGESLTYASTTFKLSEEKSNHLAENHSADFDPIVYAQIKVTN

SEQ ID NO: 2966 - protein, 52 aa, Homo sapiens
LSDQRMHLLLLPVIFLPWVLPQHKHTSATPGFSSEKQFMSETENQTANVKFY

SEQ ID NO: 2967 - protein, 86 aa, Homo sapiens
IQLKHYILALAALHCSSVLLVEIWILRREHSTALSSQENSRCKKLQCINCREESTVLQAERATTALLFNEREKMKERENFRRLGPI

SEQ ID NO: 2968 - protein, 334 aa, Homo sapiens
LVPLFCWLRATFWLLATKRRKQQLVLRGPDETKEEEEDPPLPTTPTSVNYHFTRQCNYKCGFCFHTAKTSFVLPLEEAKRGLLLLKEAGMEKINFSGGEPFLQDRGEYLGKLVRFCKVELRLPSVSIVSNGSLIRERWFQNYGEYLDILAISCDSFDEEVNVLIGRGQGKKNHVENLQKLRRWCRDYRVAFKINSVINRFNVEEDMTEQIKALNPVRWKVFQCLLIEGENCGEDALREAERFVIGDEEFERFLERHKEVSCLVPESNQKMKDSYLILDEYMRFLNCRKGRKDPSKSILDVGVEEAIKFSGFDEKMFLKRGGKYIWSKADLKLDW

SEQ ID NO: 2969 - protein, 87 aa, Homo sapiens
IALAVILCATVVQGFPMFKRGRCLCIGPGVKAVKVADIEKASIMYPSNNCDKIEVIITLKENKGQRCLNPKSKQARLIIKKVERKNF

SEQ ID NO: 2970 - protein, 162 aa, Homo sapiens
IVTANRHLLMGLTSQLLPPLFFLLACAGNFVHGHKCDITLQEIIKTLNSLTEQKTLCTELTVTDIFAASKNTTEKETFCRAATVLRQFYSHHEKDTRCLGATAQQFHRHKQLIRFLKRLDRNLWGLAGLNSCPVKEANQSTLENFLERLKTIMREKYSKCSS

SEQ ID NO: 2971 - protein, 28 aa, Homo sapiens
LEWILRVGFAAFSVLWACCSRICGAKQP

SEQ ID NO: 2972 - protein, 236 aa, Homo sapiens
LAVIHEAPAVLLCCLALLPQEVLDIQNNLYQTALHLAVHLDQPGAVRALVLKGASRALQDRHGDTALHVACQRQHLACARCLLEGRPEPGRGTSHSLDLQLQNWQGLACLHIATLQKNQPLMELLLRNGADIDVQEGTSGKTALHLAVETQERGLVQFLLQAGAQVDARMLNGCTPLHLAAGRGLMGISSTLCKAGADSLLRNVEDETPQDLTEESLVLLPFDDLKISGKLLLCTD

SEQ ID NO: 2973 - protein, 837 aa, Homo sapiens
LSEVRAALGLALYLIALRTLVQLSLQQLVLRGAAGHRGEFDALQARDYLEHITSIGPRTTGSPENEILTVHYLLEQIKLIEVQSNSLHKISVDVQRPTGSFSIDFLGGFTSYYDNITNVVVKLEPRDGAQHAVLANCHFDSVANSPGASDDAVSCSVMLEVLRVLSTSSEALHHAVIFLFNGAEENVLQASHGFITQHPWASLIRAFINLEAAGVGGKELVFQTGPENPWLVQAYVSAAKHPFASVVAQEVFQSGIIPSDTDFRIYRDFGNIPGIDLAFIENGYIYHTKYDTADRILTDSIQRAGDNILAVLKHLATSDMLAAASKYRHGNMVFFDVLGLFVIAYPSRIGSIINYMVVMGVVLYLGKKFLQPKHKTGNYKKDFLCGLGITLISWFTSLVTVLIIAVFISLIGQSLSWYNHFYVSVCLYGTATVAKIILIHTLAKRFYYMNASAQYLGEVFFDISLFVHCCFLVTLTYQGLCSAFISAVWVAFPLLTKLCVHKDFKQHGAQGKFIAFYLLGMFIPYLYALYLIWAVFEMFTPILGRSGSEIPPDVVLASILAGCTMILSSYFINFIYLAKSTKKTMLTLTLVCAITFLLVCSGTFFPYSSNPANPKPKRVFLQHMTRTFHDLEGNAVKRDSGIWINGFDYTGISHITPHIPEINDSIRAHCEENAPLCGFPWYLPVHFLIRKNWYLPAPEVSPRNPPHFRLISKEQTPWDSIKLTFEATGPSHMSFYVRAHKGSTLSQWSLGNGTPVTSKGGDYFVFYSHGLQASAWQFWIEVQVSEEHPEGMVTVAIAAHYLSGEDKRSPQLDALKEKFPDWTFPSAWVCTYDLFVF

SEQ ID NO: 2974 - protein, 28 aa, Homo sapiens
RSSFSRLTWWVSLCRALLALGEPRSVET

SEQ ID NO: 2975 - protein, 160 aa, Homo sapiens
IVLMATVLKTIVLIPFLEQNNFSPNTRTQKARHCGHCPEEWITYSNSCYYIGKERRTWEESLQACASKNSSSLLCIDNEEEMKFLASILPSSWIGVFRNSSHHPWVTINGLAFKHEIKDSDHAERNCAMLHVRGLISDQCGSSRIIRRGFIMLTRLVLNS

SEQ ID NO: 2976 - protein, 177 aa, Homo sapiens
IVLMATVLKTIVLIPFLEQNNSSPNARTQKARHCGHCPEEWITYSNSCYYIGKERRTWEESLQACASKNSSSLLCIDNEEEMKFLASILPSSWIGVFRNSSHHPWVTINGLAFKHEIKDSDHAERNCAMLHVRGLISDQCGSSRIIVSISFRIKALELAVHQIKFYICSNRNDIMIA

SEQ ID NO: 2977 - protein, 50 aa, Homo sapiens
MRKFTILKGSMLFSISLYLISDLKLLMQFMNLRKKNVNGNQMKKMRFRRN

SEQ ID NO: 2978 - protein, 764 aa, Homo sapiens
LGAPLFKAWLLISVWGLGVDPSLQIDVLTELELGESTTGVRQVPGLHNGTKAFLFQDTPRSIKASTATAEQFFQKLRNKHEFTILVTLKQTHLNSGVILSIHHLDHRYLELESSGHRNEVRLHYRSGSHRPHTEVFPYILADDKWHKLSLAISASHLILHIDCNKIYERVVEKPSTDLPLGTTFWLGQRNNAHGYFKGIMQDVQLLVMPQGFIAQCPDLNRTCPTCNDFHGLVQKIMELQDILAKTSAKLSRAEQRMNRLDQCYCERTCTMKGTTYREFESWIDGCKNCTCLNGTIQCETLICPNPDCPLKSALAYVDGKCCKECKSICQFQGRTYFEGERNTVYSSSGVCVLYECKDQTMKLVESSGCPALDCPESHQITLSHSCCKVCKGYDFCSERHNCMENSICRNLNDRAVCSCRDGFRALREDNAYCEDIDECAEGRHYCRENTMCVNTPGSFMCICKTGYIRIDDYSCTEHDECITNQHNCDENALCFNTVGGHNCVCKPGYTGNGTTCKAFCKDGCRNGGACIAANVCACPQGFTGPSCETDIDECGTGRHSCANDTICFNLDGGYDCRCPHGKNCTGDCIHDGKVKHNGQIWVLENDRCSVCSCQNGFVMCRRMVCDCENPTVDLFCCPECDPRLSSQCLHQNGETLYNSGDTWVQNCQQCRCLQGEVDCWPLPCPDVECEFSILPENECCPRCVTDPCQADTIRNDITKTCLDEMNVVRFTGSSWIKHGTECTLCQCKNGHICCSVDPQCLQEL

SEQ ID NO: 2979 - protein, 163 aa, Homo sapiens
THPTAFPATIMFAMKCLSLLKFLMDLGCDGEPCFSCLYGNGPHPPAPQPSSRFNDAPAADKEPSVVQFCEFVSAPEVSRWAGPIIDVLLDYVGNVQLCSRLKEHIDSFEDWAVIKEKAEPPRPLAHLCRLRVRKAIGKYRIKLLDTLPLPGRLIRYLKYENTQ

SEQ ID NO: 2980 - protein, 28 aa, Homo sapiens
IHFIFITMGRILLLSSLGQTSEDFSDGS

SEQ ID NO: 2981 - protein, 19 aa, Homo sapiens
LTFSSLASFPLSVLVLLTS

SEQ ID NO: 2982 - protein, 33 aa, Homo sapiens
IMAIFFFFCIIVSSLPTAELGTENACSTCLLNE

SEQ ID NO: 2983 - protein, 15 aa, Homo sapiens
IWSLAASFLEFITLL

SEQ ID NO: 2984 - protein, 272 aa, Homo sapiens
ITCKTKEARMLLAWVQAFLVSNMLLAEAYGSGGCFWDNGHLYREDQTSPAPGLRCLNWLDAQSGLASAPVSGAGNHSYCRNPDEDPRGPWCYVSGEAGVPEKRPCEDLRCPETTSQALPAFTTEIQEASEGPGADEVQVFAPANALPARSEAAAVQPVIGISQRVRMNSKEKKDLGTLGYVLGITMMVIIIAIGAGIILGYSYKRGKDLKEQHDQKVCEREMQRITLPLSAFTNPTCEIVDEKTVVVHTSQTPVDPQEGTTPLMGQAGTPGA

SEQ ID NO: 2985 - protein, 56 aa, Homo sapiens
IKICLLLILMLPAQQVHQRARMNYGCHECPCEAVGKPWLDCEGYLKSILESTRSSM

SEQ ID NO: 2986 - protein, 49 aa, Homo sapiens
MLPTLTAPTLALLLLPKISCLLTSTHPRTQGSRAHFPRAWRTPQTPSSM

SEQ ID NO: 2987 - protein, 27 aa, Homo sapiens
ILLFCLPFLVALNEIQMHYPELKLPYF

SEQ ID NO: 2988 - protein, 16 aa, Homo sapiens
KFTLLLTGVNVYLQSL

SEQ ID NO: 2989 - protein, 83 aa, Homo sapiens
KHYILALAALHCSSVLLVEIWILRREHSTALSSQENSRCKKLQCINCREESTVLQAERATTALLFNEREKMKERENFRRLGPI

SEQ ID NO: 2990 - protein, 199 aa, Homo sapiens
LFFLLFIPVFCKAMHVAQPAVVLASSRGIASFVCEYASPGKATEVRVTVLRQADSQVTEVCAATYMMGNELTFLDDSICTGTSSGNQVNLTIQGLRAMDTGLYICKVELMYPPPYYLGIGNGTQIYVIDPEPCPDSDFLLWILAAVSSGLFFYSFLLTAVSLSKMLKKRSPLTTGVYVKMPPTEPECEKQFQPYFIPIN

SEQ ID NO: 2991 - protein, 897 aa, Homo sapiens
IYFWGGLLPFGMLCASSTTKCTVSHEVADCSHLKLTQVPDDLPTNITVLNLTHNQLRRLPAANFTRYSQLTSLDVGFNTISKLEPELCQKLPMLKVLNLQHNELSQLSDKTFAFCTNLTELHLMSNSIQKIKNNPFVKQKNLITLDLSHNGLSSTKLGTQVQLENLQELLLSNNKIQALKSEELDIFANSSLKKLELSSNQIKEFSPGCFHAIGRLFGLFLNNVQLGPSLTEKLCLELANTSIRNLSLSNSQLSTTSNTTFLGLKWTNLTMLDLSYNNLNVVGNDSFAWLPQLEYFFLEYNNIQHLFSHSLHGLFNVRYLNLKRSFTKQSISLASLPKIDDFSFQWLKCLEHLNMEDNDIPGIKSNMFTGLINLKYLSLSNSFTSLRTLTNETFVSLAHSPLHILNLTKNKISKIESDAFSWLGHLEVLDLGLNEIGQELTGQEWRGLENIFEIYLSYNKYLQLTRNSFALVPSLQRLMLRRVALKNVDSSPSPFQPLRNLTILDLSNNNIANINDDMLEGLEKLEILDLQHNNLARLWKHANPGGPIYFLKGLSHLHILNLESNGFDEIPVEVFKDLFELKIIDLGLNNLNTLPASVFNNQVSLKSLNLQKNLITSVEKKVFGPAFRNLTELDMRFNPFDCTCESIAWFVNWINETHTNIPELSSHYLCNTPPHYHGFPVRLFDTSSCKDSAPFELFFMINTSILLIFIFIVLLIHFEGWRISFYWNVSVHRVLGFKEIDRQTEQFEYAAYIIHAYKDKDWVWEHFSSMEKEDQSLKFCLEERDFEAGVFELEAIVNSIKRSRKIIFVITHHLLKDPLCKRFKVHHAVQQAIEQNLDSIILVFLEEIPDYKLNHALCLRRGMFKSHCILNWPVQKERIGAFRHKLQVALGSKNSVH

SEQ ID NO: 2992 - protein, 73 aa, Homo sapiens
MGHERRQTLNLITMLAIRVLADQNVIPNVANVTCYYQPAPYVADANFSNYYIAQVQPVFTCQQQTYSTWLPCN

SEQ ID NO: 2993 - protein, 30 aa, Homo sapiens
VAGCVFLLISVLLLSGLTWQRRQRKSRRTI

SEQ ID NO: 2994 - protein, 41 aa, Homo sapiens
LLFSSFLWFAIRCGCSLDRKGKYTLTPRSPGQKSRWAQWVP

SEQ ID NO: 2995 - protein, 857 aa, Homo sapiens
LQTKDLIWTLFFLGTAVSLQVDIVPSQGEISVGESKFFLCQVAGDAKDKDISWFSPNGEKLTPNQQRISVVWNDDSSSTLTIYNANIDDAGIYKCVVTGEDGSESEATVNVKIFQKLMFKNAPTPQEFREGEDAVIVCDVVSSLPPTIIWKHKGRDVILKKDVRFIVLSNNYLQIRGIKKTDEGTYRCEGRILARGEINFKDIQVIVNVPPTIQARQNIVNATANLGQSVTLVCDAEGFPEPTMSWTKDGEQIEQEEDDEKYIFSDDSSQLTIKKVDKNDEAEYICIAENKAGEQDATIHLKVFAKPKITYVENQTAMELEEQVTLTCEASGDPIPSITWRTSTRNISSEEKASWTRPEKQETLDGHMVVRSHARVSSLTLKSIQYTDAGEYICTASNTIGQDSQSMYLEVQYAPKLQGPVAVYTWEGNQVNITCEVFAYPSATISWFRDGQLLPSSNYSNIKIYNTPSASYLEVTPDSENDFGNYNCTAVNRIGQESLEFILVQADTPSSPSIDQVEPYSSTAQVQFDEPEATGGVPILKYKAEWRAVGEEVWHSKWYDAKEASMEGIVTIVGLKPETTYAVRLAALNGKGLGEISAASEFKTQPVPGEPSAPKLEGQMGEDGNSIKVNLIKQDDGGSPIRHYLVRYRALSSEWKPEIRLPSGSDHVMLKSLDWNAEYEVYVVAENQQGKSKAAHFVFRTSAQPTAIPANGSPTSGLSTGAIVGILIVIFVLLLVVVDITCYFLNKCGLFMCIAVNLCGKAGPGAKGKDMEEGKAAFSKDESKEPIVEVRTEEERTPNHDGGKHTEPNETTPLTEPEKGPVEAKPECQETETKPAPAEVKTVPNDATQTKENESKA

SEQ ID NO: 2996 - protein, 167 aa, Homo sapiens
VTLGILCLLLLMIVTVLVTNIFQCIQEKHQRQEILRNCSEKYIMQNDNYLKEQILTNKTLKFDVLKNSFQQKKELDSRLIQKNRCHRENEIVFKVLQNTGKFSEDHGSCCGVNCYYFTMQKKDWKGCKQTCQHCRSSLLKIDDKDELVFYIHFYSLGLCFSMLDLRY

SEQ ID NO: 2997 - protein, 97 aa, Homo sapiens
LFHMPRKRMISLRFLAWYFLDLKIQGETHDSIEDARTALQLYRKYLELSKNGTEPESFHKVLKGLYEKGRKMDWKVPEPEGQTSPKNAAVFSSVLAL

SEQ ID NO: 2998 - protein, 49 aa, Homo sapiens
IGVILCQSVSMVILYRLFLSHSLYWEVSSLSSVTLPLTISSGHKSRPHF

SEQ ID NO: 2999 - protein, 814 aa, Homo sapiens
ISFVIMCIFYMPTVNSLPELSPQKYFSTLQPGKASLAYFCQADSPRTSVFLEELNEAVRPLQDYGISVAKVNCVKEEISRYCGKEKDLMKAYLFKGNILLREFPTDTLFDVNAIVAHVLFALLFSEVKYITNLEDLQNIENALKGKANIIFSYVRAIGIPEHRAVMEAAFVYGTTYQFVLTTEIALLESIGSEDVEYAHLYFFHCKLVLDLTQQCRRTLMEQPLTTLNIHLFIKTMKAPLLTEVAEDPQQVSTVHLQLGLPLVFIVSQQATYEADRRTAEWVAWRLLGKAGVLLLLRDSLEVNIPQDANVVFKRAEEGVPVEFLVLHDVDLIISHVENNMHIEEIQEDEDNDMEGPDIDVQDDEVAETVFRDRKRKLPLELTVELTEETFNATVMASDSIVLFYAGWQAVSMAFLQSYIDVAVKLKGTSTMLLTRINCADWSDVCTKQNVTEFPIIKMYKKGENPVSYAGMLGTEDLLKFIQLNRISYPVNITSIQEAEEYLSGELYKDLILYSSVSVLGLFSPTMKTAKEDFSEAGNYLKGYVITGIYSEEDVLLLSTKYAASLPALLLARHTEGKIESIPLASTHAQDIVQIITDALLEMFPEITVENLPSYFRLQKPLLILFSDGTVNPQYKKAILTLVKQKYLDSFTPCWLNLKNTPVGRGILRAYFDPLPPLPLLVLVNLHSGGQVFAFPSDQAIIEENLVLWLKKLEAGLENHITILPAQEWKPPLPAYDFLSMIDAATSQRGTRKVPKCMKETDVQENDKEQHEDKSAVRKEPIETLRIKHWNRSNWFKEAEKSFRRDKELGCSKVN

SEQ ID NO: 3000 - protein, 635 aa, Homo sapiens
IAGVCGWLLLSGPCGVGLDLDSRLLGASAMRRSEVLAEESIVCLQKALNHLREIWELIGIPEDQRLQRTEVVKKHIKELLDMMIAEEESLKERLIKSISVCQKELNTLCSELHVEPFQEEGETTILQLEKDLRTQVELMRKQKKERKQELKLLQEQDQELCEILCMPHYDIDSASVPSLEELNQFRQHVTTLRETKASRREEFVSIKRQIILCMEALDHTPDTSFERDVVCEDEDAFCLSLENIATLQKLLRQLEMQKSQNEAVCEGLRTQIRELWDRLQIPEEEREAVATIMSGSKAKVRKALQLEVDRLEELKMQNMKKVIEAIRVELVQYWDQCFYSQEQRQAFAPFCAEDYTESLLQLHDAEIVRLKNYYEVHKELFEGVQKWEETWRLFLEFERKASDPNRFTNRGGNLLKEEKQRAKLQKMLPKLEEELKARIELWEQEHSKAFMVNGQKFMEYVAEQWEMHRLEKERAKQERQLKNKKQTETEMLYGSAPRTPSKRRGLAPNTPGKARKLNTTTMSNATANSSIRPIFGGTVYHSPVSRLPPSGSKPVAASTCSGKKTPRTGRHGANKENLELNGSILSGGYPGSAPLQRNFSINSVASTYSEFARELSKASKSDATSGILNSTNIQS

SEQ ID NO: 3001 - protein, 61 aa, Homo sapiens
LALGSLRLLSLAGCPLLTTTGLSGLVQLQELEELELTNCPGATPELFKYFSQHLPRCLVIE

SEQ ID NO: 3002 - protein, 827 aa, Homo sapiens
KQLLFSLLVLTLLCDACQKVYLRVPSHLQAETLVGKVNLEECLKSASLIRSSDPAFRILEDGSIYTTHDLILSSERKSFSIFLSDGQRREQQEIKVVLSARENKSPKKRHTKDTALKRSKRRWAPIPASLMENSLGPFPQHVQQIQSDAAQNYTIFYSISGPGVDKEPFNLFYIEKDTGDIFCTRSIDREKYEQFALYGYATTADGYAPEYPLPLIIKIEDDNDNAPYFEHRVTIFTVPENCRSGTSVGKVTATDLDEPDTLHTRLKYKILQQIPDHPKHFSIHPDTGVITTTTPFLDREKCDTYQLIMEVRDMGGQPFGLFNTGTITISLEDENDNPPSFTETSYVTEVEENRIDVEILRMKVQDQDLPNTPHSKAVYKILQGNENGNFIISTDPNTNEGVLCVVKPLNYEVNRQVILQVGVINEAQFSKAASSQTPTMCTTTVTVKIIDSDEGPECHPPVKVIQSQDGFPAGQELLGYKALDPEISSGEGLRYQKLGDEDNWFEINQHTGDLRTLKVLDRESKFVKNNQYNISVVAVDAVGRSCTGTLVVHLDDYNDHAPQIDKEVTICQNNEDFAVLKPVDPDGPENGPPFQFFLDNSASKNWNIEEKDGKTAILRQRQNLDYNYYSVPIQIKDRHGLVATHMLTVRVCDCSTPSECRMKDKSTRDVRPNVILGRWAILAMVLGSVLLLCILFTCFCVTAKRTVKKCFPEDIAQQNLIVSNTEGPGEEVTEANIRLPMQTSNICDTSMSVGTVGGQGIKTQQSFEMVKGGYTLDSNKGGGHQTLESVKGVGQGDTGRYAYTDWQSFTQPRLGEESIRGHTLIKN

SEQ ID NO: 3003 - protein, 168 aa, Homo sapiens
LVAGLVICLVVCIQRFAQAQQQLPLESLGWDVAELQLNHTGPQQDPRLYWQGGPALGRSFLHGPELDKGQLRIHRDGIYMVHIQVTLAICSSTTASRHHPTTLAVGICSPASRSISLLRLSFHQGCTIASQRLTPLARGDTLCTNLTGTLLPSRNTDETFFGVQWVRP

SEQ ID NO: 3004 - protein, 415 aa, Homo sapiens
MTLGIYLQLFFLSIVSQPTFINSVLPISAALPSLDQKKRGGHKACCLLTPPPPPLFPPPFFRGGRSPGPPGLPGKTGPKGEKGELGRPGRKGRPGPPGVPGMPGPIGWPGPEGPRGEKGDLGMMGLPGSRGPMGSKGYPGSRGEKGSRGEKGDLGPKGEKGFPGFPGMLGQKGEMGPKGEPGIAGHRGPTGRPGKRGKQGQKGDSGVMGPPGKPGPSGQPGRPGPPGPPPAGQLIMGPKGERGFPGPPGRCLCGPTMNVNNPSYGESVYGPSSPRVPVIFVVNNQEELERLNTQNAIAFRRDQRSLYFKDSLGWLPIQLTPFYPVDYTADQHGTCGDGLLQPGEECDDGNSDVGDDCIRCHRAYCGDGHRHEGVEDCDGSDFGYLTCETYLPGSYGDLQCTQYCYIDSTPCRYFT

SEQ ID NO: 3005 - protein, 50 aa, Homo sapiens
MARGAALALLLFGLLGVLVAAPDGGFDLSDALPGEYQHHFLKSRQYFMLT

SEQ ID NO: 3006 - protein, 71 aa, Homo sapiens
RIDAFCTCLWALLLGLHLAEQHLQAASPSWLDTLKFSTTSLCCLVGFTAAVATRKATGPRRFRPRRSEKQP

SEQ ID NO: 3007 - protein, 76 aa, Homo sapiens
IAFIFLIIKSYRKYHSKPQAPDPHSDPPAKLSSIPGESLTYASTTFKLSEEKSNHLAENHSADFDPIVYAQIKVTN

SEQ ID NO: 3008 - protein, 65 aa, Homo sapiens
TILSAGNWLLLVSLLLKFEMLYLIGLGLGDAKDITVKGLEVVRRCSRVYLEAYTSVLTVGKEALG

SEQ ID NO: 3009 - protein, 17 aa, Homo sapiens
IFYIYMRRVSQLLIKLL

SEQ ID NO: 3010 - protein, 39 aa, Homo sapiens
ILLLLALVAILWKLGFFKRKYEKMTKNPDEIDETTELSS

SEQ ID NO: 3011 - protein, 544 aa, Homo sapiens
RLSEPLPAMLLLWVSVVAALALAVLAPGAGEQRRRAAKAPNVVLVVSDSFDGRLTFHPGSQVVKLPFINFMKTRGTSFLNAYTNSPICCPSRAAMWSGLFTHLTESWNNFKGLDPNYTTWMDVMERHGYRTQKFGKLDYTSGHHSISNRVEAWTRDVAFLLRQEGRPMVNLIRNRTKVRVMERDWQNTDKAVNWLRKEAINYTEPFVIYLGLNLPHPYPSPSSGENFGSSTFHTSLYWLEKVSHDAIKIPKWSPLSEMHPVDYYSSYTKNCTGRFTKKEIKNIRAFYYAMCAETDAMLGEIILALHQLDLLQKTIVIYSSDHGELAMEHRQFYKMSMYEASAHVPLLMMGPGIKAGLQVSNVVSLVDIYPTMLDIAGIPLPQNLSGYSLLPLSSETFKNEHKVKNLHPPWILSEFHGCNVNASTYMLRTNHWKYIAYSDGASILPQLFDLSSDPDELTNVAVKFPEITYSLDQKLHSIINYPKVSASVHQYNKEQFIKWKQSIGQNYSNVIANLRWHQDWQKEPRKYENAIDQWLKTHMNPRAV

SEQ ID NO: 3012 - protein, 35 aa, Homo sapiens
KESAKPLLMMWRLTAIFLFQLILPRCISQKTLIHR

SEQ ID NO: 3013 - protein, 22 aa, Homo sapiens
RKWSIGMKWLLVAAWRTPAALL

SEQ ID NO: 3014 - protein, 22 aa, Homo sapiens
RVLNMPRTQIPALLLLVLHGHL

SEQ ID NO: 3015 - protein, 20 aa, Homo sapiens
ITELHSFLILLLILAPNKTG

SEQ ID NO: 3016 - protein, 266 aa, Homo sapiens
MRKLWLTYSSQTTAILGALLGSCCPQLQVLEVSTGINRNSIPLQLPVEALQKGCPQLQVLRLLNLMWLPKPPGRGVAPGPGFPSLEELCLASSTCNFVSNEVLGRLLHGSPNLRLLDLRGCARITPAGLQDLPCRELEQLHLGLYGTSDRLTLAKEGSPFLTQKWCHTLRELDLSGQGFSEKDLEQALAAFLSTPGGSHPALCSLNLRGTRVTPSTVSSVISGCPGLLYLNLESCRCLPRGLKRAYRGLEEVQWCLEQLLTSPSPS

SEQ ID NO: 3017 - protein, 110 aa, Homo sapiens
ILALLGICSLTAYIVEGVGSEVSDKRTCVSLTTQRLPVSRIKTYTITEGSLRAVIFITKRGLKVCADPQATWVRDVVRSMDRKSNTRNNMIQTKPTGTQQSTNTAVTLTG

SEQ ID NO: 3018 - protein, 362 aa, Homo sapiens [sequence omitted]

SEQ ID NO: 3019 - protein, 17 aa, Homo sapiens
LLVGFLSCVSLVFVKFN

SEQ ID NO: 3020 - protein, 39 aa, Homo sapiens
MVIALILFLLRPPNLRGSSLPGKPTSPHNGQDPPAPPVD

SEQ ID NO: 3021 - protein, 23 aa, Homo sapiens
ILELIMTALQIASFILLRLFAED

SEQ ID NO: 3022 - protein, 124 aa, Homo sapiens
KDATYTSARTLLAILRLSTALARLRMVDVVEKEDVNEAIRLMEMSKDSLLGDKGQTARTQRPADVIFATVRELVSGGRSVRFSEAEQRCVSRGFTPAQFQAALDEYEELNVWQVNASRTRITFV

SEQ ID NO: 3023 - protein, 29 aa, Homo sapiens
ISWPFVLLIMPLVIWVYSTDTNFSDMFWS

SEQ ID NO: 3024 - protein, 406 aa, Homo sapiens
MLLWTAVLLFVPCVGKTVWLYLQAWPNPVFEGDALTLRCQGWKNTPLSQVKFYRDGKFLHFSKENQTLSMGAATVQSRGQYSCSGQVMYIPQTFTQTSETAMVQVQELFPPPVLSAIPSPEPREGSLVTLRCQTKLHPLRSALRLLFSFHKDGHTLQDRGPHPELCIPGAKEGDSGLYWCEVAPEGGQVQKQSPQLEVRVQAPVSRPVLTLHHGPADPAVGDMVQLLCEAQRGSPPILYSFYLDEKIVGNHSAPCGGTTSLLFPVKSEQDAGNYSCEAENSVSRERSEPKKLSLKGSQVLFTPASNWLVPWLPASLLGLMVIAAALLVYVRSWRKAGPLPSQIPPTAPGGEQCPLYANVHHQKGKDEGVVYSVVHRTSKRSEARSAEFTVGRKFYHLCGGEMPAAQ

SEQ ID NO: 3025 - protein, 144 aa, Homo sapiens
MRWCLLLIWAQGLRQAPLASGMMTGTIETTGNISAEKGGSIILQCHLSSTTAQVTQVNWEQQDQLLAICNADLGWHISPSFKDRVAPGPGLGLTLQSLTVNDTGEYFCIYHTYPDGTYTGRIFLEVLESSGIPAGASWWINLSL

SEQ ID NO: 3026 - protein, 32 aa, Homo sapiens
VRPANLIKILLESALLVSYLCQISSWETAVTT

SEQ ID NO: 3027 - protein, 150 aa, Homo sapiens
ICLMVIFLGTLVHKSSSQGQDRHMIRMRQLIDIVDQLKNYVNDLVPEFLPAPEDVETNCEWSAFSCFQKAQLKSANTGNNERIINVSIKKLKRKPPSTNAGRRQKHRLTCPSCDSYEKKPPKEFLERFKSLLQKMIHQHLSSRTHGSEDS

SEQ ID NO: 3028 - protein, 12 aa, Homo sapiens
IKGSLLLVWGLR

SEQ ID NO: 3029 - protein, 18 aa, Homo sapiens
IGMKWLLVAAWRTPAALL

SEQ ID NO: 3030 - protein, 53 aa, Homo sapiens
MGTALKLLLGAGAVAYGVRESVFTVEGGHRAIFFNRIGGVQQDTILAEGLHFR

SEQ ID NO: 3031 - protein, 578 aa, Homo sapiens
MWNLVPWVLFCGCCRIFPDGVAGREQLLAQQRMHSMISSVDVKSEVPVGLEPISPLDLRTDLRMMMPVVDPVVREKQLQQELLLIQQQQQIQKQLLIAEFQKQHENLTRQHQAQLQEHIKELLAIKQQQELLEKEQKLEQQRQEQEVERHRREQQLPPLRGKDRGRERAVASTEVKQKLQEFLLSKSATKDTPTNGKNHSVSRHPKLWYTAAHHTSLDQSSPPLSGTSPSYKYTLPGAQDAKDDFPLRKTESSVSSSSPGSGPSSPNNGPTGSVTENETSVLPPTPHAEQMVSQQRILIHEDSMNLLSLYTSPSLPNITLGLPAVPSQLNASNSLKEKQKCETQTLRQGVPLPGQYGGSIPASSSHPHVTLEGKPPNSSHQALLQHLLLKEQMRQQKLLVAGGVPLHPQSPLATKERISPGIRGTHKLPRHRPLNRTQSAPLPQSTLAQLVIQQQHQQFLEKQKQYQQQIHMNKLLSKSIEQLKQPGSHLEEAEEELQGDQAMQEDRAPSSGNSTRSDSSACVDDTLGQVGAVKVKEEPVDSDEDAQIQEMESGEQAAFMQQVIGKDLAPGFVIKVII

SEQ ID NO: 3032 - protein, 1087 aa, Homo sapiens
LLGVFLALVAPGVLGISCGSPPPILNGRISYYSTPIAVGTVIRYSCSGTFRLIGEKSLLCITKDKVDGTWDKPAPKCEYFNKYSSCPEPIVPGGYKIRGSTPYRHGDSVTFACKTNFSMNGNKSVWCQANNMWGPTRLPTCVSVFPLECPALPMIHNGHHTSENVGSIAPGLSVTYSCESGYLLVGEKIINCLSSGKWSAVPPTCEEARCKSLGRFPNGKVKEPPILRVGVTANFFCDEGYRLQGPPSSRCVIAGQGVAWTKMPVCEEIFCPSPPPILNGRHIGNSLANVSYGSIVTYTCDPDPEEGVNFILIGESTLRCTVDSQKTGTWSGPAPRCELSTSAVQCPHPQILRGRMVSGQKDRYTYNDTVIFACMFGFTLKGSKQIRCNAQGTWEPSAPVCEKECQAPPNILNGQKEDRHMVRFDPGTSIKYSCNPGYVLVGEESIQCTSEGVWTPPVPQCKVAACEATGRQLLTKPQHQFVRPDVNSSCGEGYKLSGSVYQECQGTIPWFMEIRLCKEITCPPPPVIYNGAHTGSSLEDFPYGTTVTYTCNPGPERGVEFSLIGESTIRCTSNDQERGTWSGPAPLCKLSLLAVQCSHVHIANGYKISGKEAPYFYNDTVTFKCYSGFTLKGSSQIRCKADNTWDPEIPVCEKGCQSPPGLHHGRHTGGNTVFFVSGMTVDYTCDPGYLLVGNKSIHCMPSGNWSPSAPRCEETCQHVRQSLQELPAGSRVELVNTSCQDGYQLTGHAYQMCQDAENGIWFKKIPLCKVIHCHPPPVIVNGKHTGMMAENFLYGNEVSYECDQGFYLLGEKKLQCRSDSKGHGSWSGPSPQCLRSPPVTRCPNPEVKHGYKLNKTHSAYSHNDIVYVDCNPGFIMNGSRVIRCHTDNTWVPGVPTCIKKAFIGCPPPPKTPNGNHTGGNIARFSPGMSILYSCDQGYLLVGEALLLCTHEGTWSQPAPHCKEVNCSSPADMDGIQKGLEPRKMYQYGAVVTLECEDGYMLEGSPQSQCQSDHQWNPPLAVCRSRSLAPVLCGIAAGLILLTFLIVITLYVISKHRARNYYTDTSQKEAFHLEAREVYSVDPYNPAS

SEQ ID NO: 3033 - protein, 254 aa, Homo sapiens
LLPVGPLGRSMRWCLLLIWAQGLRQAPLASGMMTGTIETTGNISAEKGGSIILQCHLSSTTAQVTQVNWEQQDQLLAICNADLGWHISPSFKDRVAPGPGLGLTLQSLTVNDTGEYFCIYHTYPDGTYTGRIFLEVLESSVAEHGARFQIPLLGAMAATLVVICTAVIVVVALTRKKKALRIHSVEGDLRRKSAGQEEWSPSAPSPPGSCVQAEAAPAGLCGEQRGEDCAELHDYFNVLSYRSLGNCSFFTETG

SEQ ID NO: 3034 - protein, 40 aa, Homo sapiens
MYFYLHIISLLIILFLPMKPQAHTQRRPQTLNSINKRKTD

SEQ ID NO: 3035 - protein, 472 aa, Homo sapiens
IACAFTLSLVYLIRLAAGHLVQLPAGVKSPPYIFSPIPFLGHAIAFGKSPIEFLENAYEKYGPVFSFTMVGKTFTYLLGSDAAALLFNSKNEDLNAEDVYSRLTTPVFGKGVAYDVPNPVFLEQKKMLKSGLNIAHFKQHVSIIEKETKEYFESWGESGEKNVFEALSELIILTASHCLHGKEIRSQLNEKVAQLYADLDGGFSHAAWLLPGWLPLPSFRRRDRAHREIKDIFYKAIQKRRQSQEKIDDILQTLLDATYKDGRPLTDDEVAGMLIGLLLAGQHTSSTTSAWMGFFLARDKTLQKKCYLEQKTVCGENLPPLTYDQLKDLNLLDRCIKETLRLRPPIMIMMRMARTPQTVAGYTIPPGHQVCVSPTVNQRLKDSWVERLDFNPDRYLQDNPASGEKFAYVPFGAGRHRCIGENFAYVQIKTIWSTMLRLYEFDLIDGYFPTVNYTTMIHTPENPVIRYKRRSK

SEQ ID NO: 3036 - protein, 153 aa, Homo sapiens
LWVLLGAVTLLFLISLAAHLSQWTRGRSRSHPGQGRSGESVEEVPLYGNLHYLQTGRLSQDPEPDQQDPTLGGPARAAEEVMCYTSLQLRPPQGRIPGPGTPVKYSEVVLDSEPKSQASGPEPELYASVCAQTRRARASFPDQAYANSQPAAS

SEQ ID NO: 3037 - protein, 23 aa, Homo sapiens
LSISLILTAWFINMDLNFMDTLS

SEQ ID NO: 3038 - protein, 13 aa, Homo sapiens
ILALIIGLSVGLN

SEQ ID NO: 3039 - protein, 805 aa, Homo sapiens
LIFGLGAVWGLGVDPSLQIDVLTELELGESTTGVRQVPGLHNGTKAFLFQDTPRSIKASTATAEQFFQKLRNKHEFTILVTLKQTHLNSGVILSIHHLDHRYLELESSGHRNEVRLHYRSGSHRPHTEVFPYILADDKWHKLSLAISASHLILHIDCNKIYERVVEKPSTDLPLGTTFWLGQRNNAHGYFKGIMQDVQLLVMPQGFIAQCPDLNRTCPTCNDFHGLVQKIMELQDILAKTSAKLSRAEQRMNRLDQCYCERTCTMKGTTYREFESWIDGCKNCTCLNGTIQCETLICPNPDCPLKSALAYVDGKCCKECKSICQFQGRTYFEGERNTVYSSSGVCVLYECKDQTMKLVESSGCPALDCPESHQITLSHSCCKVCKGYDFCSERHNCMENSICRNLNDRAVCSCRDGFRALREDNAYCEDIDECAEGRHYCRENTMCVNTPGSFMCICKTGYIRIDDYSCTEHDECITNQHNCDENALCFNTVGGHNCVCKPGYTGNGTTCKAFCKDGCRNGGACIAANVCACPQGFTGPSCETDIDECSDGFVQCDSRANCINLPGWYHCECRDGYHDNGMFSPSGESCEDIDECGTGRHSCANDTICFNLDGGYDCRCPHGKNCTGDCIHDGKVKHNGQIWVLENDRCSVCSCQNGFVMCRRMVCDCENPTVDLFCCPECDPRLSSQCLHQNGETLYNSGDTWVQNCQQCRCLQGEVDCWPLPCPDVECEFSILPENECCPRCVTDPCQADTIRNDITKTCLDEMNVVRFTGSSWIKHGTECTLCQCKNGHICCSVDPQCLQEL

SEQ ID NO: 3040 - protein, 1328 aa, Homo sapiens
LCALLSCLLLTGSSSGSKLKDPELSLKGTQHIMQAGQTLHLQCRGEAAHKWSLPEMVSKESERLSITKSACGRNGKQFCSTLTLNTAQANHTGFYSCKYLAVPTSKKKETESAIYIFISDTGRPFVEMYSEIPEIIHMTEGRELVIPCRVTSPNITVTLKKFPLDTLIPDGKRIIWDSRKGFIISNATYKEIGLLTCEATVNGHLYKTNYLTHRQTNTIIDVQISTPRPVKLLRGHTLVLNCTATTPLNTRVQMTWSYPDEKNKRASVRRRIDQSNSHANIFYSVLTIDKMQNKDKGLYTCRVRSGPSFKSVNTSVHIYDKAFITVKHRKQQVLETVAGKRSYRLSMKVKAFPSPEVVWLKDGLPATEKSARYLTRGYSLIIKDVTEEDAGNYTILLSIKQSNVFKNLTATLIVNVKPQIYEKAVSSFPDPALYPLGSRQILTCTAYGIPQPTIKWFWHPCNHNHSEARCDFCSNNEESFILDADSNMGNRIESITQRMAIIEGKNKMASTLVVADSRISGIYICIASNKVGTVGRNISFYITDVPNGFHVNLEKMPTEGEDLKLSCTVNKFLYRDVTWILLRTVNNRTMHYSISKQKMAITKEHSITLNLTIMNVSLQDSGTYACRARNVYTGEEILQKKEITIRDQEAPYLLRNLSDHTVAISSSTTLDCHANGVPEPQITWFKNNHKIQQEPGIILGPGSSTLFIERVTEEDEGVYHCKATNQKGSVESSAYLTVQGTSDKSNLELITLTCTCVAATLFWLLLTLFIRKMKRSSSEIKTDYLSIIMDPDEVPLDEQCERLPYDASKWEFARERLKLGKSLGRGAFGKVVQASAFGIKKSPTCRTVAVKMLKEGATASEYKALMTELKILTHIGHHLNVVNLLGACTKQGGPLMVIVEYCKYGNLSNYLKSKRDLFFLNKDAALHMEPKKEKMEPGLEQGKKPRLDSVTSSESFASSGFQEDKSLSDVEEEEDSDGFYKEPITMEDLISYSFQVARGMEFLSSRKCIHRDLAARNILLSENNVVKICDFGLARDIYKNPDYVRKGDTRLPLKWMAPESIFDKIYSTKSDVWSYGVLLWEIFSLGGSPYPGVQMDEDFCSRLREGMRMRAPEYSTPEIYQIMLDCWHRDPKERPRFAELVEKLGDLLQANVQQDGKDYIPINAILTGNSGFTYSTPAFSEDFFKESISAPKFNSGSSDDVRYVNAFKFMSLERIKTFEELLPNATSMFDDYQGDSSTLLASPMLKRFTWTDSKPKASLKIDLRVTSKSKESGLSDVSRPSFCHSSCGHVSEGKRRFTYDHAELERKIACCSPPPDYNSVVLYSTPPI

SEQ ID NO: 3041 - protein, 26 aa, Homo sapiens
MWRLTAIFLFQLILPRCISQKTLIHR

SEQ ID NO: 3042 - protein, 21 aa, Homo sapiens
IFGMIFSMILCCAIRRNREMV

SEQ ID NO: 3043 - protein, 10 aa, Homo sapiens
MIFFGKVFLV

SEQ ID NO: 3044 - protein, 220 aa, Homo sapiens
MESPTLLCVALLFFAPDGVLAVSSTKWFHNGSLSEETNSSLNIVNAKFEDSGEYKCQHQQVNESEPVYLEVFSDWLLLQASAEVVMEGQPLFLRCHGWRNWDVYKVIYYKDGEALKYWYENHNISITNATVEDSGTYYCTGKVWQLDYESEPLNITVIKAPREKYWLQFFIPLLVVILFAVDTGLFISTQQQVTFLLKIKRTRKGFRLLNPHPKPNPKNN

SEQ ID NO: 3045 - protein, 257 aa, Homo sapiens
MWGLLTFIMVPGCQAELCDDDPPEIPHATFKAMAYKEGTMLNCECKRGFRRIKSGSLYMLCTGNSSHSSWDNQCQCTSSATRNTTKQVTPQPEEQKERKTTEMQSPMQPVDQASLPGHCREPPPWENEATERIYHFVVGQMVYYQCVQGYRALHRGPAESVCKMTHGKTRWTQPQLICTGEEKPQASPEGRPESETSCLVTTTDFQIQTEMAATMETSIFTTEYQVAVAGCVFLLISVLLLSGLTWQRRQRKSRRTI

SEQ ID NO: 3046 - protein, 54 aa, Homo sapiens
IHVFYSKVLNMGVSFFYSLSLMTQQKRNCRPWDNQHLNKLYNYFFKLSYRVIRL

SEQ ID NO: 3047 - protein, 32 aa, Homo sapiens
MTVYLLLLSARMMRILTTIILTEAPKMVSWGT

SEQ ID NO: 3048 - protein, 55 aa, Homo sapiens
VAGATSLVTLLLAVPITVLAVLALVPQDQGGLGFRSCQRRSQKQISAPGSQLPTS

SEQ ID NO: 3049 - protein, 25 aa, Homo sapiens
MFVVATLLVTAKMTHQWKQLASLLR

SEQ ID NO: 3050 - protein, 25 aa, Homo sapiens
MFVVATLLVTAKMTHQWKQLASLLR

SEQ ID NO: 3051 - protein, 110 aa, Homo sapiens
KAADVWSLGVMLYTLLVGRYPFHDSDPSALFSKIRRGQFCIPEHISPKARCLIRSLLRREPSERLTAPEILLHPWFESVLEPGYIDSEIGTSDQIVPEYQEDSDISSFFC

SEQ ID NO: 3052 - protein, 33 aa, Homo sapiens
INLAFGFAVTLGILIAGQVSGKALTLPPALGPQ

SEQ ID NO: 3053 - protein, 38 aa, Homo sapiens
IAGVFVYQLMIGCHLEQPPPSNEEENVKLAHVKHKEQI

SEQ ID NO: 3054 - protein, 641 aa, Homo sapiens
IFFGFSSSFIFLPKLLLVGEKKMPQLNGGGGDDLGANDELISFKDEGEQEEKSSENSSAERDLADVKSSLVNESETNQNSSSDSEAERRPPPRSESFRDKSRESLEEAAKRQDGGLFKGPPYPGYPFIMIPDLTSPYLPNGSLSPTARTLHFQSGSTHYSAYKTIEHQIAVQYLQMKWPLLDVQAGSLQSRQALKDARSPSPAHIVSNKVPVVQHPHHVHPLTPLITYSNEHFTPGNPPPHLPADVDPKTGIPRPPHPPDISPYYPLSPGTVGQIPHPLGWLVPQQGQPVYPITTGGFRHPYPTALTVNASMSRFPPHMVPPHHTLHTTGIPHPAIVTPTVKQESSQSDVGSLHSSKHQDSKKEEEKKKPHIKKPLNAFMLYMKEMRAKVVAECTLKESAAINQILGRRWHALSREEQAKYYELARKERQLHMQLYPGWSARDNYGKKKKRKRDKQPGETNEHSECFLNPCLSLPPITDLSAPKKCRARFGLDQQNNWCGPCRRKKKCVRYIQGEGSCLSPPSSDGSLLDSPPPSPNLLGSPPRDAKSQTEQTQPLSLSLKPDPLAHLSMMPPPPALLLAEATHKASALCPNGALDLPPAALQPAAPSSSIAQPSTSSLHSHSSLAGTQPQPLSLVTKSLE

SEQ ID NO: 3055 - protein, 37 aa, Homo sapiens
ILGVGVGVAIIELLGMVLSICLCRHVHSEDYSKVPKY

SEQ ID NO: 3056 - protein, 13 aa, Homo sapiens
RARCRALFLVFII

SEQ ID NO: 3057 - protein, 87 aa, Homo sapiens
LTLLLPGLGIFGSTSTVTLPETLLFVSTLDGSLHAVSKRTGSIKWTLKEGNLDLVLGRHGHLLNWFHRNIFWRKRKHYSLSNKINKK

SEQ ID NO: 3058 - protein, 43 aa, Homo sapiens
ILFLGASMVYLIRVARRNQERALRTVWSSGDDKEQLVKNTYVL

SEQ ID NO: 3059 - protein, 198 aa, Homo sapiens
MSYNEKSDIWSLGCLLYELCALMPPFTAFSQKELAGKIREGKFRRIPYRYSDELNEIITRMLNLKDYHRPSVEEILENPLIADLVADEQRRNLERRGRQLGEPEKSQDSSPVLSELKLKEIQLQERERALKAREERLEQKEQELCVRERLAEDKLARAENLLKNYSLLKERKFLSLASNPESHFVAQAGMQWCDHSSM

SEQ ID NO: 3060 - protein, 255 aa, Homo sapiens
MSYNEKSDIWSLGCLLYELCALMPPFTAFSQKELAGKIREGKFRRIPYRYSDELNEIITRMLNLKDYHRPSVEEILENPLIADLVADEQRRNLERRGRQLGEPEKSQDSSPVLSELKLKEIQLQERERALKAREERLEQKEQELCVRERLAEDKLARAENLLKNYSLLKERKFLSLASNPELLNLPSSVIKKKVHFSGESKENIMRSENSESQLTSKSKCKDLKKRLHAAQLRAQALSDIEKNYQLKSRQILGMR

SEQ ID NO: 3061 - protein, 194 aa, Homo sapiens
MSYNEKSDIWSLGCLLYELCALMPPFTAFSQKELAGKIREGKFRRIPYRYSDELNEIITRMLNLKDYHRPSVEEILENPLIADLVADEQRRNLERRGRQLGEPEKSQDSSPVLSELKLKEIQLQERERALKAREERLEQKEQELCVRERLAEDKLARAENLLKNYSLLKERKFLSLASNPGMRINLVNRSWCYK

SEQ ID NO: 3062 - protein, 599 aa, Homo sapiens
LVTLCFGALFLLPHSSRLKRLFLAPRTQQPGLEVVAEIAGHAPAREQEPPPNPAPAAPAPGEDDPSSWASPRRRKGGLRRTRPTGPREEATAARGNSIPASRPGDEGVPFRFDFNAFRSRLRHPVLGTRADESQEPQSQVRAQREKIKEMMQFAWQSYKRYAMGKNELRPLTKDGYEGNMFGGLSGATVIDSLDTLYLMELKEEFQEAKAWVGESFHLNVSGEASLFEVNIRYIGGLLSAFYLTGEEVFRIKAIRLGEKLLPAFNTPTGIPKGVVSFKSGNWGWATAGSSSILAEFGSLHLEFLHLTELSGNQVFAEKVRNIRKVLRKIEKPFGLYPNFLSPVSGNWVQHHVSVGGLGDSFYEYLIKSWLMSGKTDMEAKNMYYEALEAIETYLLNVSPGGLTYIAEWRGGILDHKMGHLACFSGGMIALGAEDAKEEKRAHYRELAAQITKTCHESYARSDTKLGPEAFWFNSGREAVATQLSESYYILRPEVVESYMYLWRQTHNPIYREWGWEVVLALEKYCRTEAGFSGIQDVYSSTPNHDNKQQSFFLAETLKYLYLLFSEDDLLSLEDWVFNTEAHPLPVNHSDSSGRAWGRH

SEQ ID NO: 3063 - protein, 21 aa, Homo sapiens
KSQSRHRNMPLIQCLCLAVTC

SEQ ID NO: 3064 - protein, 61 aa, Homo sapiens
IFLCVWMFIGIILTALIKSDLRRHNINIGITNVDVKAIPADSPTDQEPKTVMLSKQSESAI

SEQ ID NO: 3065 - protein, 69 aa, Homo sapiens
VAACVLLLTSAQLGLHIWQLRSQCMWPRETQLLLEVPPSTEDARSCQFPEEERGERSAEEKGRLGDLWV

SEQ ID NO: 3066 - protein, 35 aa, Homo sapiens
IPYLTALGDLLGTGLLALSFHVLWLIGDRDTDVGD

SEQ ID NO: 3067 - protein, 10 aa, Homo sapiens
IIIMLYLNYL

SEQ ID NO: 3068 - protein, 28 aa, Homo sapiens
LALALALALELRRSLGLSLAARSLDTFS

SEQ ID NO: 3069 - protein, 35 aa, Homo sapiens
KLFTVLLSSHVLFCFLNFPPRSVYTGLSKLLCCWN

SEQ ID NO: 3070 - protein, 43 aa, Homo sapiens
ITGFRLSLGILALLTLLGALGIANSFLDEYLDLNIAKKLRRQF

SEQ ID NO: 3071 - protein, 484 aa, Homo sapiens
LGFAGVLFGWPSLVFVFKNEDYFKDLCGPDAGPIGNATGQAGRLGCMGDLFSTPDCKAQDERFSLIFTLGSFMNNFMTFPTGYIFDRFKTTVARLIAIFFYTTATLIIAFTSAGSAVLLFLAMPMLTIGGILFLITNLQIGNLFGQHRSTIITLYNGAFDSSSAVFLIIKLLYEKGISLRASFIFISVCSTWHVARTFLLMPRGHIPYPLPPNYSYGLCPGNGTTKEEKETAEHENRELQSKEFLSAKEETPGAGQKQELRSFWSYAFSRRFAWHLVWLSVIQLWHYLFIGTLNSLLTNMAGGDMARVSTYTNAFAFTQFGVLCAPWNGLLMDRLKQKYQKEARKTGSSTLAVALCSTVPSLALTSLLCLGFALCASVPILPLQYLTFILQVISRSFLYGSNAAFLTLAFPSEHFGKLFGLVMALSAVVSLLQFPIFTLIKGSLQNDPFYVNVMFMLAILLTFFHPFLVYRECRTWKESPSAIA

SEQ ID NO: 3072 - protein, 169 aa, Homo sapiens
VNFILRCGLLLVTLSLAIAKHKQSSFTKSCYPRGTLSQAVDALYIKAAWLKATIPEDRIKNIRLLKKKTKKQFMKNCQFQEQLLSFFMEDVFGQLQLQGCKKIRFVEDFHSLRQKLSHCISCASSAREMKSITRMKRIFYRIGNKGIYKAISELDILLSWIKKLLESSQ

SEQ ID NO: 3073 - protein, 20 aa, Homo sapiens
LAASLWLGVLPTLTLGLLVH

SEQ ID NO: 3074 - protein, 22 aa, Homo sapiens
TLLAHLVVVITLFWSRCPSSCH

SEQ ID NO: 3075 - protein, 106 aa, Homo sapiens
KVLVDQLVASPLLGVWYFLGLGCLEGQTVGESCQELREKFWEFYKADWCVWPAAQFVNFLFVPPQFRVTYINGLTLGWDTYLSYLKYRSPVPLTPPGCVALDTRAD

SEQ ID NO: 3076 - protein, 187 aa, Homo sapiens
LLLTLAVIAILLFILLWHLCWPKEKADPYPYPGLVCGVPNTHTPSSSHLSSPGALETGDTWKEASLLPLLSRELSSLASQPLSRLLDELEVLEELIVLLDPEPGPGGGMAHGTTRHLAARYGLPAAWSTFAYSLRPSRSPLRALIEMVVAREPSASLGQLGTHLAQLGRADALRVLSKLGSSGVCWA

SEQ ID NO: 3077 - protein, 201 aa, Homo sapiens
KVLAAGVVPLLLVLHWKHGAGSPLPITPVNATCAIRHPCHNNLMNQIRSQLAQLNGSANALFILYYTAQGEPFPNNLDKLCGPNVTDFPPFHANGTEKAKLVELYRIVVYLGTSLGNITRDQKILNPSALSLHSKLNATADILRGLLSNVLCRLCSKYHVGHVDVTYGPDTSGKDVFQKKKLGCQLLGKYKQIIAVLAQAF

SEQ ID NO: 3078 - protein, 522 aa, Homo sapiens
LFLLRALGFLIGLVGRAALVLGGPKFASKTPRPVTEPLLLLSGMQLAKLIRQRKVKCIDVVQAYINRIKDVNPMINGIVKYRFEEAMKEAHAVDQKLAEKQEDEATLENKWPFLGVPLTVKEAFQLQGMPNSSGLMNRRDAIAKTDATVVALLKGAGAIPLGITNCSELCMWYESSNKIYGRSNNPYDLQHIVGGSSGGEGCTLAAACSVIGVGSDIGGSIRMPAFFNGIFGHKPSPGVVPNKGQFPLAVGAQELFLCTGPMCRYAEDLAPMLKVMAGPGIKRLKLDTKVHLKDLKFYWMEHDGGSFLMSKVDQDLIMTQKKVVVHLETILGASVQHVKLKKMKYSFQLWIAMMSAKGHDGKEPVKFVDLLGDHGKHVSPLWELIKWCLGLSVYTIPSIGLALLEEKLRYSNEKYQKFKAVEESLRKELVDMLGDDGVFLYPSHPTVAPKHHVPLTRPFNFAYTGVFSALGLPVTQCPLGLNAKGLPLGIQVVAGPFNDHLTLAVAQYLEKTFGGWVCPGKF

SEQ ID NO: 3079 - protein, 89 aa, Homo sapiens
KALPVNVKWLLCGCLCCCCTLGCSLWPVICLNKRTRRSIQKLIEWENNRLYHKLALHWKLTKRKCETSNMMEYVILIEFLPKYPIFRPD

SEQ ID NO: 3080 - protein, 37 aa, Homo sapiens
LQALLRCFTWLRLCQISMFLSLKCLNTRSSHLGAHCR

SEQ ID NO: 3081 - protein, 30 aa, Homo sapiens
LHICHAVILLQLWLGPQPFPKSTQHSKKAH

SEQ ID NO: 3082 - protein, 267 aa, Homo sapiens
ILVVVLAVVVPRWRQQWSGPGTTKRFPETVLARCVKYTEIHPEMRHVDCQSVWDAFKGAFISKHPCNITEEDYQPLMKLGTQTVPCNKILLWSRIKDLAHQFTQVQRDMFTLEDTLLGYLADDLTWCGEFNTSKINYQSCPDWRKDCSNNPVSVFWKTVSRRFAEAACDVVHVMLNGSRSKIFDKNSTFGSVEVHNLQPEKVQTLEAWVIHGGREDSRDLCQDPTIKELESIISKRNIQFSCKNIYRPDKFLQCVKNPEDSSCTSEI

SEQ ID NO: 3083 - protein, 11 aa, Homo sapiens
LLLIIFSLKLG

SEQ ID NO: 3084 - protein, 124 aa, Homo sapiens
LTTATLALCLVFTVATIMVLVVQRTDSIPNSPDNVPLKGGNCSEDLLCILKRAPFKKSWAYLQVAKHLNKTKLSWNKDGILHGVRYQDGNLVIQFPDYCGMILHHSHSTLDSGKGHCCLETLQP

SEQ ID NO: 3085 - protein, 322 aa, Homo sapiens
VALLAALWLLWLLGSAPRGTPAPQPTITILVWHWPFTDQPPELPSDTCTRYGIARCHLSANRSLLASADAVVFHHRELQTRRSHLPLAQRPRGQPWVWASMESPSHTHGLSHLRGIFNWVLSYRRDSDIFVPYGRLEPHWGPSPPLPAKSRVAAWVVSNFQERQLRARLYRQLAPHLRVDVFGRANGRPLCASCLVPTVAQYRFYLSFENSQHRDYITEKFWRNALVAGTVPVVLGPPRATYEAFVPADAFVHVDDFGSARELAAFLTGMNESRYQRFFAWRDRLRVRLFTDWRERFCAICDRYPHLPRSQVYEDLEGWFQA

SEQ ID NO: 3086 - protein, 1121 aa, Homo sapiens
ISSLTWFTTIVPLVLVITMTAVKDATDDYFRHKSDNQVNNRQSEVLINSKLQNEKWMNVKVGDIIKLENNQFVAADLLLLSSSEPHGLCYVETAELDGETNLKVRHALSVTSELGADISRLAGFDGIVVCEVPNNKLDKFMGILSWKDSKHSLNNEKIILRGCILRNTSWCFGMVIFAGPDTKLMQNSGKTKFKRTSIDRLMNTLVLWIFGFLICLGIILAIGNSIWESQTGDQFRTFLFWNEGEKSSVFSGFLTFWSYIIILNTVVPISLYVSVEVIRLGHSYFINWDRKMYYSRKAIPAVARTTTLNEELGQIEYIFSDKTGTLTQNIMTFKRCSINGRIYGEVHDDLDQKTEITQEKEPVDFSVKSQADREFQFFDHHLMESIKMGDPKVHEFLRLLALCHTVMSEENSAGELIYQVQSPDEGALVTAARNFGFIFKSRTPETITIEELGTLVTYQLLAFLDFNNTRKRMSVIVRNPEGQIKLYSKGADTILFEKLHPSNEVLLSLTSDHLSEFAGEGLRTLAIAYRDLDDKYFKEWHKMLEDANAATEERDERIAGLYEEIERDLMLLGATAVEDKLQEGVIETVTSLSLANIKIWVLTGDKQETAINIGYACNMLTDDMNDVFVIAGNNAVEVREELRKAKQNLFGQNRNFSNGHVVCEKKQQLELDSIVEETITGDYALIINGHSLAHALESDVKNDLLELACMCKTVICCRVTPLQKAQVVELVKKYRNAVTLAIGDGANDVSMIKSAHIGVGISGQEGLQAVLASDYSFAQFRYLQRLLLVHGRWSYFRMCKFLCYFFYKNFAFTLVHFWFGFFCGFSAQTVYDQWFITLFNIVYTSLPVLAMGIFDQDVSDQNSVDCPQLYKPGQLNLLFNKRKFFICVLHGIYTSLVLFFIPYGAFYNVAGEDGQHIADYQSFAVTMATSLVIVVSVQIALDTSYWTFINHVFIWGSIAIYFSILFTMHSNGIFGIFPNQFPFVGNARHSLTQKCIWLVILLTTVASVMPVVAFRFLKVDLYPTLSDQIRRWQKAQKKARPPSSRRPRTRRSSSRRSGYAFAHQEGYGELITSGKNMRAKNPPPTSGLEKTHYNSTSWIENLCKKTTDTVSSFSQDKTVKL

SEQ ID NO: 3087 - protein, 774 aa, Homo sapiens
IKDIARLTLLSVAMLASSKRMNSSSRSQILLRWKSDKAQSGPYNVEKEILTSRFLRDTETCRQNFRNFPYPDLAGPRKALSQLRELCLKWLRPEIHSKEQILELLVLEQFLTILPGEVRTWVKSQYPESSEEAVTLVEDLTQILEEEAPQNSTLSQDTPEEDPRGKHAFQTGWLNDLVTKESMTFKDVAVDITQEDWELMRPVQKELYKTVTLQNYWNMVSLGLTVYRPTVIPILEEPWMVIKEILEGPSPEWETKAQACTPVEDMSKLTKEETHTIKLEDSYDYDDRLERRGKGGFWKIHTDERGFSLKSVLSQEYDPTEECLSKYDIYRNNFEKHSNLIVQFDTQLDNKTSVYNEGRATFNHVSYGIVHRKILPGEKPYKCNVCGKKFRKYPSLLKHQSTHAKEKSYECEECGKEFRHISSLIAHQRMHTGEKPYECHQCGKAFSQRAHLTIHQRIHTGEKPYKCDDCGKDFSQRAHLTIHQRTHTGEKPYKCLECGKTFSHSSSLINHQRVHTGEKPYICNECGKTFSQSTHLLQHQKIHTGKKPYKCNECWKVFSQSTYLIRHQRIHSGEKCYKCNECGKAFAHSSTLIQHQTTHTGEKSYICNICGKAFSQSANLTQHHRTHTGEKPYKCSVCGKAFSQSVHLTQHQRIHNGEKPFKCNICGKAYRQGANLTQHQRIHTGEKPYKCNECGKAFIYSSSLNQHQRTHTGERPYKCNECDKDFSQRTCLIQHQRIHTGEKPYACRICGKTFTQSTNLIQHQRVHTGAKHRN

SEQ ID NO: 3088 - protein, 183 aa, Homo sapiens
LAVIAILLFILLWHLCWPKEKADPYPYPGLVCGVPNTHTPSSSHLSSPGALETGDTWKEASLLPLLSRELSSLASQPLSRLLDELEVLEELIVLLDPEPGPGGGMAHGTTRHLAARYGLPAAWSTFAYSLRPSRSPLRALIEMVVAREPSASLGQLGTHLAQLGRADALRVLSKLGSSGVCWA

SEQ ID NO: 3089 - protein, 155 aa, Homo sapiens [sequence omitted]

SEQ ID NO: 3090 - protein, 426 aa, Homo sapiens
LTSGDVTKRLLIQKNCLLLLTYLISELEAARMLCVNAPPKKAQEGGGSEVFQELKGICIALGMSKPPANITMFQFFSGIEKKLKETLAKVPPNHVGKPLLKKPMGPAHWEKIEAINQAIANEYEVRRKLLIKRLDVTVQSFGWSDRAKSQTEKLAKVYQPKRSVLSPKTTISVAHLLAARQDLSKILRTSSGSIREKTACAINKVLMGRVPDRGGRPNEIEPPPPEMPPWQKRQDGPQQQTGGRGGGRGGYEHSSYGGRGGHEQGGGRGGRGGYDHGGRGGGRGNKHQGGWTDGGSGGGGGYQDGGYRDSGFQPGGYHGGHSSGGYQGGGYGGFQTSSSYTGSGYQGGGYQQDNRYQDGGHHGDRGGGRGGRGGRGGRGGRAGQGGGWGGRGSQNYHQGGQFEQHFQHGGYQYNHSGFGQGRHYTS

SEQ ID NO: 3091 - protein, 24 aa, Homo sapiens
MPRRRPSEHSLASLAATWLCCVCA

SEQ ID NO: 3092 - protein, 17 aa, Homo sapiens
LAPQVWDFWVFSWLASC

SEQ ID NO: 3093 - protein, 187 aa, Homo sapiens
RTETDMEQGKGLAVLILAIILLQGTLAQSIKGNHLVKVYDYQEDGSVLLTCDAEAKNITWFKDGKMIGFLTEDKKKWNLGSNAKDPRGMYQCKGSQNKSKPLQVYYRMCQNCIELNAATISGFLFAEIVSIFVLAVGVYFIAGQDGVRQSRASDKQTLLPNDQLYQPLKDREDDQYSHLQGNQLRRN

SEQ ID NO: 3094 - protein, 177 aa, Homo sapiens
ILLVLVVTGLSVSVTSLIQKSSIEKCSVDIQQSRNKTTERPGLLNCPIYWQQLREKCLLFSHTVNPWNNSLADCSTKESSLLLIRDKDELIHTQNLIRDKAILFWIGLNFSLSEKNWKWINGSFLNSNDLEIRGDAKENSCISISQTSVYSEYCSTEIRWICQKELTPVRNKVYPDS

SEQ ID NO: 3095 - protein, 810 aa, Homo sapiens
LRTFCLIFGLGAVWGLGVDPSLQIDVLTELELGESTTGVRQVPGLHNGTKAFLFQDTPRSIKASTATAEQFFQKLRNKHEFTILVTLKQTHLNSGVILSIHHLDHRYLELESSGHRNEVRLHYRSGSHRPHTEVFPYILADDKWHKLSLAISASHLILHIDCNKIYERVVEKPSTDLPLGTTFWLGQRNNAHGYFKGIMQDVQLLVMPQGFIAQCPDLNRTCPTCNDFHGLVQKIMELQDILAKTSAKLSRAEQRMNRLDQCYCERTCTMKGTTYREFESWIDGCKNCTCLNGTIQCETLICPNPDCPLKSALAYVDGKCCKECKSICQFQGRTYFEGERNTVYSSSGVCVLYECKDQTMKLVESSGCPALDCPESHQITLSHSCCKVCKGYDFCSERHNCMENSICRNLNDRAVCSCRDGFRALREDNAYCEDIDECAEGRHYCRENTMCVNTPGSFMCICKTGYIRIDDYSCTEHDECITNQHNCDENALCFNTVGGHNCVCKPGYTGNGTTCKAFCKDGCRNGGACIAANVCACPQGFTGPSCETDIDECSDGFVQCDSRANCINLPGWYHCECRDGYHDNGMFSPSGESCEDIDECGTGRHSCANDTICFNLDGGYDCRCPHGKNCTGDCIHDGKVKHNGQIWVLENDRCSVCSCQNGFVMCRRMVCDCENPTVDLFCCPECDPRLSSQCLHQNGETLYNSGDTWVQNCQQCRCLQGEVDCWPLPCPDVECEFSILPENECCPRCVTDPCQADTIRNDITKTCLDEMNVVRFTGSSWIKHGTECTLCQCKNGHICCSVDPQCLQEL

SEQ ID NO: 3096 - protein, 18 aa, Homo sapiens
LTYWLLGLLLHCNFLPWT

SEQ ID NO: 3097 - protein, 61 aa, Homo sapiens
IYFPPLQKVFQTESLSILDLLFLLGLTSSVCIVAEIIKKVERSREKIQKHVSSTSSSFLEV

SEQ ID NO: 3098 - protein, 14 aa, Homo sapiens
IFCFKLLYFMELWL

SEQ ID NO: 3099 - protein, 53 aa, Homo sapiens
IFYLTLIIFTCKFARLQSIFPDFSKAGMERAFLPVTSPNKHLGLVTPHKTELV

SEQ ID NO: 3100 - protein, 33 aa, Homo sapiens
MYLLLLLKSVVYFAIITCCLLRRTAFCCNGEKS

SEQ ID NO: 3101 - protein, 274 aa, Homo sapiens
MGTWLLACICICTCVCLGVSVTGEGQGPRSRTFTCLTNNILRIDCHWSAPELGQGSSPWLLFTRLLAAHISASCGAVSAPSCCHLRQCSCHLTISPSLSTTACLGGSRSAWWTRSTCPGDTSNISSGHCILTWSISPALEPMTTLLSYELAFKKQEEAWEQAQHRDHIVGVTWLILEAFELDPGFIHEARLRVQMATLEDDVVEEERYTGQWSEWSQPVCFQAPQRQGPLIPPWGWPGNTLVAVSIFLLLTGPTYLLFKLSPRLGWGPTGPVCC

SEQ ID NO: 3102 - protein, 50 aa, Homo sapiens
LILLTFLIVITLYVISKHRARNYYTDTSQKEAFHLEAREVYSVDPYNPAS

SEQ ID NO: 3103 - protein, 448 aa, Homo sapiens
LGIYLQLFFLSIVSQPTFINSVLPISAALPSLDQKKRGGHKACCLLTPPPPPLFPPPFFRGGRSPLLSPDMKNLMLELETSQSPCMQGSLGSPGPPGPQGPPGLPGKTGPKGEKGELGRPGRKGRPGPPGVPGMPGPIGWPGPEGPRGEKGDLGMMGLPGSRGPMGSKGYPGSRGEKGSRGEKGDLGPKGEKGFPGFPGMLGQKGEMGPKGEPGIAGHRGPTGRPGKRGKQGQKGDSGVMGPPGKPGPSGQPGRPGPPGPPPAGQLIMGPKGERGFPGPPGRCLCGPTMNVNNPSYGESVYGPSSPRVPVIFVVNNQEELERLNTQNAIAFRRDQRSLYFKDSLGWLPIQLTPFYPVDYTADQHGTCGDGLLQPGEECDDGNSDVGDDCIRDCHRAYCGDGHRHEGVEDCDGSDFGYLTCETYLPGSYGDLQCTQYCYIDSTPCRYFT

SEQ ID NO: 3104 - protein, 9 aa, Homo sapiens
LLACSLLLA

SEQ ID NO: 3105 - protein, 66 aa, Homo sapiens
LLVIAVAIATVIVISLVMLRKRQYGTISHGIVEVDPMLTPEERHLNKMQNHGYENPTYKYLEQMQI

SEQ ID NO: 3106 - protein, 47 aa, Homo sapiens
LASLLVLLALLLAALLYVKCRLNVLLWYQDAYGEVEINATAPRTASS

SEQ ID NO: 3107 - protein, 686 aa, Homo sapiens
IVLQAPSTLEALLQSLVIVLLGFRSLLSDLCSYEVLNLLTAQQYEIFSRSFHKNRELFVHGLPGLGKTIMAMKIMEKIRNVFHCEAHRILYICESQFLRNFIRKEFLRGNGLAAGKMNISIDLDTNYAELVLNVGRVTLGENNRKKMKDCQLRKQQNENVSRAVCALLNSGGGVIKAEVENKGYSYKKDGIGLDLENSFSNMLPFVPNFLDFMQNGNYFHIFVKSWSLETSGPQIATLSSSLYKRDVTSAKVMNASAALEFLKDMEKTGGRAYLRPEFPAKRACVDVQEESNMEALAADFFNRTELGYKEKLTFTESTHVEIKNFSTEKLLQRITEILPQYVSAFANTDGGYLFVGLNEDKEVIGFKAEKSYLTKLEEVTKNSIGKLPVHHFCVEKGTINYLCKFLGVYDKGRLCGYVYALRVERFCCAVFAKKPDSWHVKDNRVKQLTEKEWIQFMVDSEPVCEELPSPASTSSPVSQSYPLREYINFKIQPLRYHLPGLSEKITCAPKTFCRNLFSQHEGLKQLICEEMGSVNKGSLIFSRSWSLDLGLQENHKVLCDALLISQDKPPVLYTFHMVQDEEFKDYSTQTAQTLKQKLAKIGGYTKKVCVMTKIFYLSPEGKTSCQYDLNSQVIYPESYYWTTAQTMKDLEKALSNILPKENQIFLFVCLFRFCLFVCWFVCFFLR

SEQ ID NO: 3108 - protein, 2117 aa, Homo sapiens
LWPLFLFFILVAVRHSHPPLEHHECHFPNKPLPSAGTVPWLQGLICNVNNTCFPQLTPGEEPGRLSNFNDSLVSRLLADARTVLGGASAHRTLAGLGKLIATLRAARSTAQPQPTKQSPLEPPMLDVAELLTSLLRTESLGLALGQAQEPLHSLLEAAEDLAQELLALRSLVELRALLQRPRGTSGPLELLSEALCSVRGPSSTVGPSLNWYEASDLMELVGQEPESALPDSSLSPACSELIGALDSHPLSRLLWRRLKPLILGKLLFAPDTPFTRKLMAQVNRTFEELTLLRDVREVWEMLGPRIFTFMNDSSNVAMLQRLLQMQDEGRRQPRPGGRDHMEALRSFLDPGSGGYSWQDAHADVGHLVGTLGRVTECLSLDKLEAAPSEAALVSRALQLLAEHRFWAGVVFLGPEDSSDPTEHPTPDLGPGHVRIKIRMDIDVVTRTNKIRDRFWDPGPAADPLTDLRYVWGGFVYLQDLVERAAVRVLSGANPRAGLYLQQMPYPCYVDDVFLRVLSRSLPLFLTLAWIYSVTLTVKAVVREKETRLRDTMRAMGLSRAVLWLGWFLSCLGPFLLSAALLVLVLKLGDILPYSHPGVVFLFLAAFAVATVTQSFLLSAFFSRANLAAACGGLAYFSLYLPYVLCVAWRDRLPAGGRVAASLLSPVAFGFGCESLALLEEQGEGAQWHNVGTRPTADVFSLAQVSGLLLLDAALYGLATWYLEAVCPGQYGIPEPWNFPFRRSYWCGPRPPKSPAPCPTPLDPKVLVEEAPPGLSPGVSVRSLEKRFPGSPQPALRGLSLDFYQGHITAFLGHNGAGKTTTLSILSGLFPPSGGSAFILGHDVRSSMAAIRPHLGVCPQYNVLFDMLTVDEHVWFYGRLKGLSAAVVGPEQDRLLQDVGLVSKQSVQTRHLSGGMQRKLSVAIAFVGGSQVVILDEPTAGVDPASRRGIWELLLKYREGRTLILSTHHLDEAELLGDRVAVVAGGRLCCCGSPLFLRRHLGSGYYLTLVKARLPLTTNEKADTDMEGSVDTRQEKKNGSQGSRVGTPQLLALVQHWVPGARLVEELPHELVLVLPYTGAHDGSFATLFRELDTRLAELRLTGYGISDTSLEEIFLKVVEECAADTDMEDGSCGQHLCTGIAGLDVTLRLKMPPQETALENGEPAGSAPETDQGSGPDAVGRVQGWALTRQQLQALLLKRFLLARRSRRGLFAQIVLPALFVGLALVFSLIVPPFGHYPALRLSPTMYGAQVSFFSEDAPGDPGRARLLEALLQEAGLEEPPVQHSSHRFSAPEVPAEVAKVLASGNWTPESPSPACQCSRPGARRLLPDCPAAAGGPPPPQAVTGSGEVVQNLTGRNLSDFLVKTYPRLVRQGLKTKKWVNEVRYGGFSLGGRDPGLPSGQELGRSVEELWALLSPLPGGALDRVLKNLTAWAHSLDAQDSLKIWFNNKGWHSMVAFVNRASNAILRAHLPPGPARHAHSITTLNHPLNLTKEQLSEGALMASSVDVLVSICVVFAMSFVPASFTLVLIEERVTRAKHLQLMGGLSPTLYWLGNFLWDMCNYLVPACIVVLIFLAFQQRAYVAPANLPALLLLLLLYGWSITPLMYPASFFFSVPSTAYVVLTCINLFIGINGSMATFVLELFSDQKLQEVSRILKQVFLIFPHFCLGRGLIDMVRNQAMADAFERLGDRQFQSPLRWEVVGKNLLAMVIQGPLFLLFTLLLQHRSQLLPQPRVRSLPLLGEEDEDVARERERVVQGATQGDVLVLRNLTKVYRGQRMPAVDRLCLGIPPGECFGLLGVNGAGKTSTFRMVTGDTLASRGEAVLAGHSVAREPSAAHLSMGYCPQSDAIFELLTGREHLELLARLRGVPEAQVAQTAGSGLARLGLSWYADRPAGTYSGGNKRKLATALALVGDPAVVFLDEPTTGMDPSARRFLWNSLLAVVREGRSVMLTSHSMEECEALCSRLAIMVNGRFRCLGSPQHLKGRFAAGHTLTLRVPAARSQPAAAFVAAEFPGAELREAHGGRLRFQLPPGGRCALARVFGELAVHGAEHGVEDFSVSQTMLEEVFLYFSKDQGKDEDTEEQKEAGVGVDPAPGLQHPKRVSQFLDDPSTAETVL

SEQ ID NO: 3109 - protein, 33 aa, Homo sapiens
RDMLGLRPPLLALVGLLSLGCGEFCVPRRGLHA

SEQ ID NO: 3110 - protein, 146 aa, Homo sapiens
MERIVICLMVIFLGTLVHKSSSQGQDRHMIRMRQLIDIVDQLKNYVNDLVPEFLPAPEDVETNCEWSAFSCFQKAQLKSANTGNNERIINVSIKKLKRKPPSTNAGRRQKHRLTCPSCDSYEKKPPKEFLERFKSLLQKVSTLSFI

SEQ ID NO: 3111 - protein, 83 aa, Homo sapiens
IGVIAYILLCGYPPFYDENDAKLFEQILKAEYEFDSPYWDDISDSAKDFIRHLMEKDPEKRFTCEQALQHPCKPSMPRLWCGT

SEQ ID NO: 3112 - protein, 356 aa, Homo sapiens
IFFPDAEVGVMAPRSLLLLLSGALALTDTWAGSHSLRYFSTAVSRPGRGEPRYIAVEYVDDTQFLRFDSDAAIPRMEPREPWVEQEGPQYWEWTTGYAKANAQTDRVALRNLLRRYNQSEAGSHTLQGMNGCDMGPDGRLLRGYHQHAYDGKDYISLNEDLRSWTAADTVAQITQRFYEAEEYAEEFRTYLEGECLELLRRYLENGKETLQRADPPKAHVAHHPISDHEATLRCWALGFYPAEITLTWQRDGEEQTQDTELVETRPAGDGTFQKWAAVVVPPGEEQRYTCHVQHEGLPQPLILRWEQSPQPTIPIVGIVAGLVVLGAVVTGAVVAAVMWRKKSSDRNRGSYSQAAV

SEQ ID NO: 3113 - protein, 48 aa, Homo sapiens
TDRLLLAFLLTLYLGLAHGLDQQDLRYLRAQLQRKLHLLSRPQDGEAE

SEQ ID NO: 3114 - protein, 80 aa, Homo sapiens
LLVFNFLLILTILTIWLFKNHRFRFLHETGGAMVYDKPPKFAMSREQMSQSCSHTAHNASLLTDAGPLSCGESRASCLFL

SEQ ID NO: 3115 - protein, 215 aa, Homo sapiens
VTLLLAVPITVLAVLALVPQDQGGLVTETADPGAQAQQGLGFQKLPEEEPETDLSPGLPAAHLIGAPLKGQGLGWETTKEQAFLTSGTQFSDAEGLALPQDGLYYLYCLVGYRGRAPPGGGDPQGRSVTLRSSLYRAGGAYGPGTPELLLEGAETVTPVLDPARRQGYGPLWYTSVGFGGLVQLRRGERVYVNISHPDMVDFARGKTFFGAVMVG

SEQ ID NO: 3116 - protein, 66 aa, Homo sapiens
RLPQSRGLGAGTLLWTTFSLSAGRATQSPFACGWTTRRTTSTRGTIMASPPCTGPAERAALLWLRC

SEQ ID NO: 3117 - protein, 27 aa, Homo sapiens
LIKILLESALLVSYLCQISSWETAVTT

SEQ ID NO: 3118 - protein, 43 aa, Homo sapiens
IIAGILLLLALVAILWKLGFFKRKYEKMTKNPDEIDETTELSS

SEQ ID NO: 3119 - protein, 35 aa, Homo sapiens
IVFFFSRRGGKLSHYRGPAMLCIWACCMSCCRCLH

SEQ ID NO: 3120 - protein, 15 aa, Homo sapiens
LLMFLLWLCLFSVLL

SEQ ID NO: 3121 - protein, 158 aa, Homo sapiens
KKWIHCFENVIALIYLASLSEYDQCLEENNQENRMKESLALFGTILELPWFKSTSVILFLNKTDILEEKIPTSHLATYFPSFQGPKQDAEAAKRFILDMYTRMYTGCVDGPEGSKKGARSRRLFSHYTCATDTQNIRKVFKDVRDSVLARYLDEINLL

SEQ ID NO: 3122 - protein, 57 aa, Homo sapiens
LALVIFYLTLIIFTCKFARLQSIFPDFSKAGMERAFLPVTSPNKHLGLVTPHKTELV

SEQ ID NO: 3123 - protein, 11 aa, Homo sapiens
RVFLFLFFFFF

SEQ ID NO: 3124 - protein, 265 aa, Homo sapiens
MKTSYFSLLSFFFFCLGFCLNQKICPHAGAQDKFSLSAWPSPVVPLGGRVTLSCHSHLRFVIWTIFQTTGTRSHELHTGLSNNITISPVTPEHAGTYRCVGIYKHASKWSAESNSLKIIVTGLFTKPSISAHPSSLVHAGARVDPMMRLGEKLTLFCSSEISFDQYHLFRHGVAHGQWLSGGQRHREAFQANFSVGRATPVPGGTYRCYGSFNDSPYKPPVTRCNFTPQETLRVLLCHSQNPPLNLTHLALKDSPATCICSLDSQ

SEQ ID NO: 3125 - protein, 340 aa, Homo sapiens
LNCGVSIALLGVLLLGAARLPRGAEAFEIALPRESNITVLIKLGTPTLLAKPCYIVISKRHITMLSIKSGERIVFTFSCQSPENHFVIEIQKNIDCMSGPCPFGEVQLQPSTSLLPTLNRTFIWDVKAHKSIGLELQFSIPRLRQIGPGESCPDGVTHSISGRIDATVVRIGTFCSNGTVSRIKMQEGVKMALHLPWFHPRNVSGFSIANRSSIKRLCIIESVFEGEGSATLMSANYPEGFPEDELMTWQFVVPAHLRASVSFLNFNLSNCERKEERVEYYIPGSTTNPEVFKLEDKQPGNMAGNFNLSLQGCDQDAQSPGILRLQFQVLVQHPQNESSE

SEQ ID NO: 3126 - protein, 833 aa, Homo sapiens
LNCGVSIALLGVLLLGAARLPRGAEAFEIALPRESNITVLIKLGTPTLLAKPCYIVISKRHITMLSIKSGERIVFTFSCQSPENHFVIEIQKNIDCMSGPCPFGEVQLQPSTSLLPTLNRTFIWDVKAHKSIGLELQFSIPRLRQIGPGESCPDGVTHSISGRIDATVVRIGTFCSNGTVSRIKMQEGVKMALHLPWFHPRNVSGFSIANRSSIKRLCIIESVFEGEGSATLMSANYPEGFPEDELMTWQFVVPAHLRASVSFLNFNLSNCERKEERVEYYIPGSTTNPEVFKLEDKQPGNMAGNFNLSLQGCDQDAQSPGILRLQFQVLVQHPQNESNKIYVVDLSNERAMSLTIEPRPVKQSRKFVPGCFVCLESRTCSSNLTLTSGSKHKISFLCDDLTRLWMNVEKTISCTDHRYCQRKSYSLQVPSDILHLPVELHDFSWKLLVPKDRLSLVLVPAQKLQQHTHEKPCNTSFSYLVASAIPSQDLYFGSFCPGGSIKQIQVKQNISVTLRTFAPSFQQEASRQGLTVSFIPYFKEEGVFTVTPDTKSKVYLRTPNWDRGLPSLTSVSWNISVPRDQVACLTFFKERSGVVCQTGRAFMIIQEQRTRAEEIFSLDEDVLPKPSFHHHSFWVNISNCSPTSGKQLDLLFSVTLTPRTVDLTVILIAAVGGGVLLLSALGLIICCVKKKKKKTNKGPAVGIYNDNINTEMPRQPKKFQKGRKDNDSHVYAVIEDTMVYGHLLQDSSGSFLQPEVDTYRPFQGTMGVCPPSPPTICSRAPTAKLATEEPPPRSPPESESEPYTFSHPNNGDVSSKDTDIPLLNTQEPMEPAE

SEQ ID NO: 3127 - protein, 1171 aa, Homo sapiens
LPLLLVLALSQGILNCCLAYNVGLPEAKIFSGPSSEQFGYAVQQFINPKGNWLLVGSPWSGFPENRMGDVYKCPVDLSTATCEKLNLQTSTSIPNVTEMKTNMSLGLILTRNMGTGGFLTCGPLWAQQCGNQYYTTGVCSDISPDFQLSASFSPATQPCPSLIDVVVVCDESNSIYPWDAVKNFLEKFVQGLDIGPTKTQVGLIQYANNPRVVFNLNTYKTKEEMIVATSQTSQYGGDLTNTFGAIQYARKYAYSAASGGRRSATKVMVVVTDGESHDGSMLKAVIDQCNHDNILRFGIAVLGYLNRNALDTKNLIKEIKAIASIPTERYFFNVSDEAALLEKAGTLGEQIFSIEGTVQGGDNFQMEMSQVGFSADYSSQNDILMLGAVGAFGWSGTIVQKTSHGHLIFPKQAFDQILQDRNHSSYLGYSVAAISTGESTHFVAGAPRANYTGQIVLYSVNENGNITVIQAHRGDQIGSYFGSVLCSVDVDKDTITDVLLVGAPMYMSDLKKEEGRVYLFTIKEGILGQHQFLEGPEGIENTRFGSAIAALSDINMDGFNDVIVGSPLENQNSGAVYIYNGHQGTIRTKYSQKILGSDGAFRSHLQYFGRSLDGYGDLNGDSITDVSIGAFGQVVQLWSQSIADVAIEASFTPEKITLVNKNAQIILKLCFSAKFRPTKQNNQVAIVYNITLDADGFSSRVTSRGLFKENNERCLQKNMVVNQAQSCPEHIIYIQEPSDVVNSLDLRVDISLENPGTSPALEAYSETAKVFSIPFHKDCGEDGLCISDLVLDVRQIPAAQEQPFIVSNQNKRLTFSVTLKNKRESAYNTGIVVDFSENLFFASFSLPVDGTEVTCQVAASQKSVACDVGYPALKREQQVTFTINFDFNLQNLQNQASLSFQALSESQEENKADNLVNLKIPLLYDAEIHLTRSTNINFYEISSDGNVPSIVHSFEDVGPKFIFSLKVTTGSVPVSMATVIIHIPQYTKEKNPLMYLTGVQTDKAGDISCNADINPLKIGQTSSSVSFKSENFRHTKELNCRTASCSNVTCWLKDVHMKGEYFVNVTTRIWNGTFASSTFQTVQLTAAAEINTYNPEIYVIEDNTVTIPLMIMKPDEKAEVPTGVIIGSIIAGILLLLALVAILWKLGFFKRKYEKMTKNPDEIDETTELSS

SEQ ID NO: 3128 - protein, 285 aa, Homo sapiens
VGLLAVPLLAAYLHIPPPQLSPALHSWKSSGKFFTYKGLRIFYQDSVGVVGSPEIVVLLHGFPTSSYDWYKIWEGLTLRFHRVIALDFLGFGFSDKPRPHHYSIFEQASIVEALLRHLGLQNRRINLLSHDYGDIVAQELLYRYKQNRSGRLTIKSLCLSNGGIFPETHRPLLLQKLLKDGGVLSPILTRLMNFFVFSRGLLQYINQRKKFRRRWVGALASVTIPIHFIYGPLDPVNPYPEFLELYRKTLPRSTVSILDDHISHYPQLEDPMGFLNAYMGFINSF

SEQ ID NO: 3129 - protein, 1161 aa, Homo sapiens
RTRAALLLFTALATSLGFNLDTEELTAFRVDSAGFGDSVVQYANSWVVVGAPQKITAANQTGGLYQCGYSTGACEPIGLQVPPEAVNMSLGLSLASTTSPSQLLACGPTVHHECGRNMYLTGLCFLLGPTQLTQRLPVSRQECPRQEQDIVFLIDGSGSISSRNFATMMNFVRAVISQFQRPSTQFSLMQFSNKFQTHFTFEEFRRSSNPLSLLASVHQLQGFTYTATAIQNVVHRLFHASYGARRDAAKILIVITDGKKEGDSLDYKDVIPMADAAGIIRYAIGVGLAFQNRNSWKELNDIASKPSQEHIFKVEDFDALKDIQNQLKEKIFAIEGTETTSSSSFELEMAQEGFSAVFTPDGPVLGAVGSFTWSGGAFLYPPNMSPTFINMSQENVDMRDSYLGYSTELALWKGVQSLVLGAPRYQHTGKAVIFTQVSRQWRMKAEVTGTQIGSYFGASLCSVDVDSDGSTDLVLIGAPHYYEQTRGGQVSVCPLPRGWRRWWCDAVLYGEQGHPWGRFGAALTVLGDVNGDKLTDVVIGAPGEEENRGAVYLFHGVLGPSISPSHSQRIAGSQLSSRLQYFGQALSGGQDLTQDGLVDLAVGARGQVLLLRTRPVLWVGVSMQFIPAEIPRSAFECREQVVSEQTLVQSNICLYIDKRSKNLLGSRDLQSSVTLDLALDPGRLSPRATFQETKNRSLSRVRVLGLKAHCENFNLLLPSCVEDSVTPITLRLNFTLVGKPLLAFRNLRPMLAADAQRYFTASLPFEKNCGADHICQDNLGISFSFPGLKSLLVGSNLELNAEVMVWNDGEDSYGTTITFSHPAGLSYRYVAEGQKQGQLRSLHLTCDSAPVGSQGTWSTSCRINHLIFRGGAQITFLATFDVSPKAVLGDRLLLTANVSSENNTPRTSKTTFQLELPVKYAVYTVVSSHEQFTKYLNFSESEEKESHVAMHRYQVNNLGQRDLPVSINFWVPVELNQEAVWMDVEVSHPQNPSLRCSSEKIAPPASDFLAHIQKNPVLDCSIAGCLRFRCDVPSFSVQEELDFTLKGNLSFGWVRQILQKKVSVVSVAEITFDTSVYSQLPGQEAFMRAQTTTVLEKYKVHNPTPLIVGSSIGGLLLLALITAVLYKVGFFKRQYKEMMEEANGQIAPENGTQTPSPPSEK

SEQ ID NO: 3130 - protein, 606 aa, Homo sapiens
LFALLLLCALLARLQVALQIAPPCTSEKHYEHLGRCCNKCEPGKYMSSKCTTTSDSVCLPCGPDEYLDSWNEEDKCLLHKVCDTGKALVAVVAGNSTTPRRCACTAGYHWSQDCECCRRNTECAPGLGAQHPLQLNKDTVCKPCLAGYFSDAFSSTDKCRPWTNCTFLGKRVEHHGTEKSDAVCSSSLPARKPPNEPHVYLPGLIILLLFASVALVAAIIFGVCYRKKGKALTANLWHWINEACGRLSGDKESSGDSCVSTHTANFGQQGACEGVLLLTLEEKTFPEDMCYPDQGGVCQGTCVGGGPYAQGEDARMLSLVSKTEIEEDSFRQMPTEDEYMDRPSQPTDQLLFLTEPGSKSTPPFSEPLEVGENDSLSQCFTGTQSTVGSESCNCTEPLCRTDWTPMSSENYLQKEVDSGHCPHWAASPSPNWADVCTGCRNPPGEDCEPLVGSPKRGPLPQCAYGMGLPPEEEASRTEARDQPEDGADGRLPSSARAGAGSGSSPGGQSPASGNVTGNSNSTFISSGQVMNFKGDIIVVYVSQTSQEGAAAAAEPMGRPVQEETLARRDSFAGNGPRFPDPCGGPEGLREPEKASRPVQEQGGAKA

SEQ ID NO: 3131 - protein, 15 aa, Homo sapiens
KNKGSCCLFSLWVGL

SEQ ID NO: 3132 - protein, 43 aa, Homo sapiens
KWYKILLIYFLIMLISNEDSCLKIFFNLMVSIFCKNHVNLFHS

SEQ ID NO: 3133 - protein, 19 aa, Homo sapiens
IVAALVWLIDCIKVFDLFF

SEQ ID NO: 3134 - protein, 588 aa, Homo sapiens
LGLLFLGALRAFPQDRPFEDTCHGNPSHYYDKAVRRCCYRCPMGLFPTQQCPQRPTDCRKQCEPDYYLDEADRCTACVTCSRDDLVEKTPCAWNSSRVCECRPGMFCSTSAVNSCARCFFHSVCPAGMIVKFPGTAQKNTVCEPASPGVSPACASPENCKEPSSGTIPQAKPTPVSPATSSASTMPVRGGTRLAQEAASKLTRAPDSPSSVGRPSSDPGLSPTQPCPEGSGDCRKQCEPDYYLDEAGRCTACVSCSRDDLVEKTPCAWNSSRTCECRPGMICATSATNSCARCVPYPICAAETVTKPQDMAEKDTTFEAPPLGTQPDCNPTPENGEAPASTSPTQSLLVDSQASKTLPIPTSAPVALSSTGKPVLDAGPVLFWVILVLVVVVGSSAFLLCHRRACRKRIRQKLHLCYPVQTSQPKLELVDSRPRRSSTQLRSGASVTEPVAEERGLMSQPLMETCHSVGAAYLESLPLQDASPAGGPSSPRDLPEPRVSTEHTNNKIEKIYIMKADTVIVGTVKAELPEGRGLAGPAEPELEEELEADHTPHYPEQETEPPLGSCSDVMLSVEEEGKEDPLPTAASGK

SEQ ID NO: 3135 - protein, 108 aa, Homo sapiens
MMVLALVFVRKLMDLLFTKRELSWLDDLMPESKKKKLEDAEKEEEQSMLAMEDEGTVQLPLEGHYRDDPSVINISDEMSKTALWRNLLITADNSKDKESSFPSKSSPS

SEQ ID NO: 3136 - protein, 100 aa, Homo sapiens
LVLFALAFLTCVVFLVVYKVYKYDRACPDGFVLKNTQCIPEGLESYYAEQDSSAREKFYTVINHYNLAKQSITRSVSPWMSVLSEEKLSEQETEAAEKSA

SEQ ID NO: 3137 - protein, 820 aa, Homo sapiens
LIRTMESRVLLRTFCLIFGLGAVWGLGVDPSLQIDVLTELELGESTTGVRQVPGLHNGTKAFLFQDTPRSIKASTATAEQFFQKLRNKHEFTILVTLKQTHLNSGVILSIHHLDHRYLELESSGHRNEVRLHYRSGSHRPHTEVFPYILADDKWHKLSLAISASHLILHIDCNKIYERVVEKPSTDLPLGTTFWLGQRNNAHGYFKGIMQDVQLLVMPQGFIAQCPDLNRTCPTCNDFHGLVQKIMELQDILAKTSAKLSRAEQRMNRLDQCYCERTCTMKGTTYREFESWIDGCKNCTCLNGTIQCETLICPNPDCPLKSALAYVDGKCCKECKSICQFQGRTYFEGERNTVYSSSGVCVLYECKDQTMKLVESSGCPALDCPESHQITLSHSCCKVCKGYDFCSERHNCMENSICRNLNDRAVCSCRDGFRALREDNAYCEDIDECAEGRHYCRENTMCVNTPGSFMCICKTGYIRIDDYSCTEHDECITNQHNCDENALCFNTVGGHNCVCKPGYTGNGTTCKAFCKDGCRNGGACIAANVCACPQGFTGPSCETDIDECSDGFVQCDSRANCINLPGWYHCECRDGYHDNGMFSPSGESCEDIDECGTGRHSCANDTICFNLDGGYDCRCPHGKNCTGDCIHDGKVKHNGQIWVLENDRCSVCSCQNGFVMCRRMVCDCENPTVDLFCCPECDPRLSSQCLHQNGETLYNSGDTWVQNCQQCRCLQGEVDCWPLPCPDVECEFSILPENECCPRCVTDPCQADTIRNDITKTCLDEMNVVRFTGSSWIKHGTECTLCQCKNGHICCSVDPQCLQEL

SEQ ID NO: 3138 - protein, 135 aa, Homo sapiens
RMALSVLRLALLLLAVTFAGSARSGPGERGPPEKSGFGSQTGGGPCPAPGGLGDGTRAPVTGGSPEDLPASLIPQFGLFSKYRTPNCSQYRLPGCPRHFNPVCGSDMSTYANECTLCMKIREGGHNIKIIRNGPC

SEQ ID NO: 3139 - protein, 18 aa, Homo sapiens
ILAPQVWDFWVFSWLASC

SEQ ID NO: 3140 - protein, 140 aa, Homo sapiens
ILLMSMAFLTCCLLKCVKKSKRRRSNRSAQLWSQLKDEDLETVQAAYLGLKHFNKPVSGPSQAHDNHSFTTDHGESTSKLASVTRSVDKDPGIPRALSLSGSSSSPQAQVMVHMANPRQPLPASGLATGMPQQPAAYALG

SEQ ID NO: 3141 - protein, 40 aa, Homo sapiens
LIFFSWCVWWLFLSVEGKRRYHPRLSPTPLQNGFSDTPAV

SEQ ID NO: 3142 - protein, 1016 aa, Homo sapiens
LGLLLLLARSGTRALVCLPCDESKCEEPRNCPGSIVQGVCGCCYTCASQRNESCGGTFGIYGTCDRGLRCVIRPPLNGDSLTEYEAGVCEDENWTDDQLLGFKPCNENLIAGCNIINGKCECNTIRTCSNPFEFPSQDMCLSALKRIEEEKPDCSKARCEVQFSPRCPEDSVLIEGYAPPGECCPLPSRCVCNPAGCLRKVCQPGNLNILVSKASGKPGECCDLYECKPVFGVDCRTVECPPVQQTACPPDSYETQVRLTADGCCTLPTRCECLSGLCGFPVCEVGSTPRIVSRGDGTPGKCCDVFECVNDTKPACVFNNVEYYDGDMFRMDNCRFCRCQGGVAICFTAQCGEINCERYYVPEGECCPVCEDPVYPFNNPAGCYANGLILAHGDRWREDDCTFCQCVNGERHCVATVCGQTCTNPVKVPGECCPVCEEPTIITVDPPACGELSNCTLTGKDCINGFKRDHNGCRTCQCINTEELCSERKQGCTLNCPFGFLTDAQNCEICECRPRPKKCRPIICDKYCPLGLLKNKHGCDICRCKKCPELSCSKICPLGFQQDSHGCLICKCREASASAGPPILSGTCLTVDGHHHKNEESWHDGCRECYCLNGREMCALITCPVPACGNPTIHPGQCCPSCADDFVVQKPELSTPSICHAPGGEYFVEGETWNIDSCTQCTCHSGRVLCETEVCPPLLCQNPSRTQDSCCPQCTDQPFRPSLSRNNSVPNYCKNDEGDIFLAAESWKPDVCTSCICIDSVISCFSESCPSVSCERPVLRKGQCCPYCIEDTIPKKVVCHFSGKAYADEERWDLDSCTHCYCLQGQTLCSTVSCPPLPCVEPINVEGSCCPMCPEMYVPEPTNIPIEKTNHRGEVDLEVPLWPTPSENDIVHLPRDMGHLQVDYRDNRLHPSEDSSLDSIASVVVPIIICLSIIIAFLFINQKKQWIPLLCWYRTPTKPSSLNNQLVSVDCKKGTRVQVDSSQRMLRIAEPDARFSGFYSMQKQNHLQADNFYQTV

SEQ ID NO: 3143 - protein, 71 aa, Homo sapiens
LSFLALLCSVRAALELCSPGRSPSTSSAAEEPSASAPAPLSSAAPIPGSSLRGVELFPMTVLIRLHYTFVC

SEQ ID NO: 3144 - protein, 95 aa, Homo sapiens
VGLLSTLLCLKLQRFCPDVSWNNAEDCLSGSRPIQFTSSRKYLTPALDPAALLRAEEGGNPMCLLPELPQPIFPQLGTWKKEPRTRLCFSFGPSW

SEQ ID NO: 3145 - protein, 448 aa, Homo sapiens
KPFWVGGALLAMLQGPRALASAAGQTPKVVPAMSPTELWPSGLSSPQLCPATATYYTPLYPQTAPPAAAPGTCLDATPHGPEGQVVRCLPAGRLPAKRKLDLEGIGRPVVPEFPTPKGKCIRVDGLPSPKTPKSPGEKTRYDTSLGLLTKKFIYLLSESEDGVLDLNWAAEVLDVQKRRIYDITNVLEGIQLIRKKAKNNIQWVGRGMFEDPTRPGKQQQLGQELKELMNTEQALDQLIQSCSLSFKHLTEDKANKRLAYVTYQDIRAVGNFKEQTVIAVKAPPQTRLEVPDRTEDNLQIYLKSTQGPIEVYLCPEEVQEPDSPSEEPLPSTSTLCPSPDSAQPSSSTDPSIMEPTASSVPAPAPTPQQAPPPPSLVPLEATDSLLELPHPLLQQTEDQFLSPTLACSSPLISFSPSLDQDDYLWGLEAGEGISDLFDSYDLGDLLIN

SEQ ID NO: 3146 - protein, 151 aa, Homo sapiens
KYLLLSILGLAFLSEAAARKIPKVGHTFFQKPESCPPVPGGSMKLDIGIINENQRVSMSRNIESRSTSPWNYTVTWDPNRYPSEVVQAQCRNLGCINAQGKEDISMNSVPIQQETLVVRRKHQGCSVSFQLEKVLVTVGCTCVTPVIHHVQ

SEQ ID NO: 3147 - protein, 124 aa, Homo sapiens
ILILLIVCFIRRNKGGKYPVKEKEDAHADPEIQPMKEDDGTFGEYSDAEDHKPLKKGSRTPSDRTVKKEDSDDSLVDYGEGVNGQFNEDGSFIGQYSGKKEKEPAEGNESSEAPSPVNAMNSFV

SEQ ID NO: 3148 - protein, 160 aa, Homo sapiens
LAFIVLFLLWPFAWLQVAGLSEEQLQEPITGWRKTVCHNGVLGLSRLLFFLLGFLRIRVRGQRASRLQAPVLVAAPHSTFFDPIVLLPCDLPKVVSRAENLSVPVIGALLRFNQAILVSRHDPASRRRVVEEVRRRATSGGKWPQVGKGLKTIFSLSMCS

SEQ ID NO: 3149 - protein, 48 aa, Homo sapiens
MLVSAFGLCRLSSCRAPRGVRTRRSARWALSSPAAFEVSAALGLCGGE

SEQ ID NO: 3150 - protein, 39 aa, Homo sapiens
MWCLVIAVSVALPCFPGWVFASHHGAQGQSGHEREEADI

SEQ ID NO: 3151 - protein, 98 aa, Homo sapiens
MRRWQTSYYLGAPAASAGSHGSPWQPSRSAWQRSKPAAQPPCRRAERGCPRRRLPGPSWTCRPPKSCQISMAIHPKSSSESPWRTWTPSIAPKRLSSY

SEQ ID NO: 3152 - protein, 74 aa, Homo sapiens [sequence omitted]

SEQ ID NO: 3153 - protein, 47 aa, Homo sapiens
MEFFIPTSVDLKILPLSACLGSAVSSLPWFSDDACNNAMRFAHSWRK

SEQ ID NO: 3154 - protein, 91 aa, Homo sapiens
MEFFIPTSVDLKILPLSACLGSAVSSLPWFSDDACNNAMRFAHSWAEKPSEKDPDSVVCAVTFGSVFSASESLRLPSCCSVGTPRTRAGQG

SEQ ID NO: 3155 - protein, 80 aa, Homo sapiens
MQWPEVPALPLLSSLCMAMVRKSSALGKEVGRRVKEMVMLVAPFRQSSSLSRTFSSRKVVKAHASLHGARLSPLSRNIRG

SEQ ID NO: 3156 - protein, 37 aa, Homo sapiens
MKLTIPVFLFKSLQFIMELLYWLLEGGDSEDKEVKPV

SEQ ID NO: 3157 - protein, 27 aa, Homo sapiens
MTRSLLLPGICEQLPGSGQDPFLLLIG

SEQ ID NO: 3158 - protein, 19 aa, Homo sapiens
MLLCLCIWSLFGATVDRHL

SEQ ID NO: 3159 - protein, 32 aa, Homo sapiens
LRYFIFLAFLEITTSCGSVSGNFTDLSPPSHK

SEQ ID NO: 3160 - protein, 46 aa, Homo sapiens
LRTVLAVAAAAPVSRWARTQPLGAVAFPASQRQKRGSGTQKVGLRL

SEQ ID NO: 3161 - protein, 174 aa, Homo sapiens
MTLSPLRAWPGRKPWSWRLLWAPLPSLGLPAPPRRMGPLSGPAVAFLALRAPTQPRLAPCLHPPHRLPPWAGPGHHSRGPQCHHHLQSASARRWGCCSSLGTPRPSRSPRRMTPTSGWPTSLGQMPTVAKWPGTTSPASSSVTSHCCSTSGQPQRAQGCCSPSRTRRRPWSCWA

SEQ ID NO: 3162 - protein, 64 aa, Homo sapiens
VPAAALAFAAAAAAPGSAAATPSGLSHGVSTGAGRPAVLLGPARVLDWWGAAWGQGGAAKGEAI

SEQ ID NO: 3163 - protein, 93 aa, Homo sapiens
LPPGATLCQAPEGGWLGRELRGFPGAGMSAAGLSSPCPTFLFSSLVSPTLLLPQAVPDAEFRLSRLFLVPGKAERRSSNGLVLRASGENQRSN

SEQ ID NO: 3164 - protein, 187 aa, Homo sapiens
LKREDTRKQVKIILLLFCIQQASYYGTAVMGQAYLPELGTQEVSPKVLQGPQQAWTEEVWTAWPCPEPLCIITAVPNLHPTLSLPIPGPGALLLCSRDSWSSLRQHTVLLWRRPSPTHAGMLQPVPEQVVAGGCWQRRDNGPAPGGKCWLQGTESSPCHSPCYPLGNLKGISKNSGSATLLSFLWNM

SEQ ID NO: 3165 - protein, 38 aa, Homo sapiens
LILLQMASILLLEVRTADGDKGTKVYVFRISNPGTHHF

SEQ ID NO: 3166 - protein, 95 aa, Homo sapiens
VPGQRLLDRYGHTQPLCVIQAKPPSTYMSCSTTTLSRSSLCLAAALSPRWWLRLLGCGTSLCFPMAPAHQPCQTGSVSPLSSERTHQPHSTTLPA

SEQ ID NO: 3167 - protein, 55 aa, Homo sapiens
LVLLWLPVLVRDLCPALQPSPHSLLIPLPPLLTSCSPWSRWFSRGAPAPLPRPQS

SEQ ID NO: 3168 - protein, 39 aa, Homo sapiens
LVCVAFSMGLCWMRVLLTQVYTSISGQQKRRMTQAWCIK

SEQ ID NO: 3169 - protein, 67 aa, Homo sapiens
MCHKGWHGPGVPHHVAFTPCKARLRPATQCQAHSSPRRKMVQAGSIPLAAASGRLCLTHAGWWRGAS

SEQ ID NO: 3170 - protein, 24 aa, Homo sapiens
VSSLLALQALPLPLGLDGGYLKVK

SEQ ID NO: 3171 - protein, 68 aa, Homo sapiens
MDRAAAQSLWAPTASSLLFLQSSHRPQPQPGPEPPEVVPLTGHPPAGGGRELFHAYGLPRFGTHFSTP

SEQ ID NO: 3172 - protein, 68 aa, Homo sapiens
LCPPLGPKTSILLLGSLAQGQGAQRAASARNANSCSQRRLRSQLCQLLRTHFDQRSNRDLWVGVLWRS

SEQ ID NO: 3173 - protein, 195 aa, Homo sapiens
VRLGGPGWRRGGRFGPLAAPGALSVGGEAAAAAATCPDFSVPGSACSESAAEPEGPTDVRALCGSQMAQGGALTAARLPGAAGPGAGLAGLRVRARGTVRAGLPAAAALRAGRGPPRHAAAPGGGTRGERAHQPGRGLAGPDRSQWRPGLDQGCSQLLENLDGLRVPSAAIAEPLSIHGTLKLHLAYLLDLLGQS

SEQ ID NO: 3174 - protein, 63 aa, Homo sapiens
LYTAPRKGAPRGRSLKPCLSFTFTFFFFSLEERRTECSILPYLCFYSGTNVGCVCVCFLVLVF

SEQ ID NO: 3175 - protein, 169 aa, Homo sapiens
MVSGRRPQPIHFASLPLPLPRAASSAALQFRRRLPHPALPFQGRRITRPRTRLANWAFLRAGLEQVARLRVRVGKSLNRQPCCPVGFLCLWRERESGQTSKPNSSIPEALMQLWWRPLSFLCQCLVILQRDAALHRDAHAVSHTSLHHLDCPALCILKPTACRSRHFSI

SEQ ID NO: 3176 - protein, 36 aa, Homo sapiens
VYRAALLAAIRPQVGALAHLSRAGAAGPWDSALSPA

SEQ ID NO: 3177 - protein, 109 aa, Homo sapiens
LRSFLVVVQWLMQVPLTPLWELGLGRVVENADALAIAIVLNNQWSLVPNRGILYFLPVSMKLGGDRVSCQFLTATSHQWLHSVSLTQHMAQECLPSVSVSTAAIPRCWS

SEQ ID NO: 3178 - protein, 40 aa, Homo sapiens
LAFGCTCSGIFSTRGRHRRRLASSGLICATCPLHTPPPSW

SEQ ID NO: 3179 - protein, 77 aa, Homo sapiens
VAASLPCAGPQEATRKRPPPCAPPLRLARWLPAPPDVSYLLTALPGALLAPFCPSSVSAAAGSCSGAEWLTSVLQMH

SEQ ID NO: 3180 - protein, 13 aa, Homo sapiens
LFVHLIRLLFWKI

SEQ ID NO: 3181 - protein, 35 aa, Homo sapiens
LALALPLVLIGVVSHKEALLPAWLPPLTLPPGSVL

SEQ ID NO: 3182 - protein, 53 aa, Homo sapiens
LAKFVILRNSAVLSSTASFCLPCSFPDVIQVAEFRCPCFGSLSLCLSFFPCSR

SEQ ID NO: 3183 - protein, 60 aa, Homo sapiens
LDYPRQGLCNIFFRLFWKDFAASRRSWTSALALWEGFGLSGSDFAISPWGLPWSRIHCGL

SEQ ID NO: 3184 - protein, 96 aa, Homo sapiens
VGSQQDQMPLSSLALLQMFIWCDCIMPSESTVCCPGWPRTLGSSDSSASASQVAGTTDAITTTLGSVPVQQKPLGLFDLFKCPLWKVCEWPCKKTL

SEQ ID NO: 3185 - protein, 40 aa, Homo sapiens
LLRLVRRRSRNPAFFFSLRHGLTLSPLLECSGAITDHGSV

SEQ ID NO: 3186 - protein, 24 aa, Homo sapiens
LHRVAWSCLSVLPATCLSSHPSTD

SEQ ID NO: 3187 - protein, 22 aa, Homo sapiens
LPWHRIILSFMTLWSQWTLKDF

SEQ ID NO: 3188 - protein, 27 aa, Homo sapiens
LWFIIFPVFLGQMAHNTEQASGWPLPG

SEQ ID NO: 3189 - protein, 56 aa, Homo sapiens
LVYAVRGGRRRQRGAERGRRGLSRAAAAAVGPPAPAGGPKNAGRGPGGPAPGRPQP

SEQ ID NO: 3190 - protein, 12 aa, Homo sapiens
MPFSFLATAVGL

SEQ ID NO: 3191 - protein, 112 aa, Homo sapiens
LEAGDGRIAGDFFFFKQGLTLLPRLECNGAITAHCSLNLLGSSNPPTSASWVASTMACATMPYFFFLKTGSCYIAQAGLELGSSDPHALASQSAGIIGMSHCAWPGFFFFFF

SEQ ID NO: 3192 - protein, 15 aa, Homo sapiens
LIDFLVLCLEVFAYL

SEQ ID NO: 3193 - protein, 56 aa, Homo sapiens
MKAVWWSWSCGLSPRREAATDRRCGLSLPVPQRALPVQLPRGPAGLCRAGCGGGLL

SEQ ID NO: 3194 - protein, 90 aa, Homo sapiens
LRSRACVLGSNRCFLPLLFLCLPPISVRRADKGAILEGPRETWCRCGLALPCARLGGKACSRVRAFRHRHVGRWCDSWPRREQRLPHLRG

SEQ ID NO: 3195 - protein, 18 aa, Homo sapiens
LPRTFWTRKLMKFLLLQM

SEQ ID NO: 3196 - protein, 57 aa, Homo sapiens
MVAATTCVPSGMGLLLPPEASCSNIDGPACQRVPLPSKNECLRSVLLWPQFSSFGTT

SEQ ID NO: 3197 - protein, 39 aa, Homo sapiens
LPERCWTLLLTLVLYPGSSCRYQTGTTRGHSRCCKPAPH

SEQ ID NO: 3198 - protein, 86 aa, Homo sapiens
VPASFAAASAVLSAGASILPEHGECCSPLPILIPSPPGLSAESRQISVVLCPKLPQDDGSWGQASPSGIVHCSSTLPTDQRNPSGQ

SEQ ID NO: 3199 - protein, 47 aa, Homo sapiens
LNILRTGIFVSALLMYPQQPELPDMSVIAALLIILPTADPFCETPGC

SEQ ID NO: 3200 - protein, 20 aa, Homo sapiens
LGLRLAFLLLSLQMNYCGIL

SEQ ID NO: 3201 - protein, 34 aa, Homo sapiens
LGMGCWQGSKSLFLLISYSTNTSSDDFPKLMRMR

SEQ ID NO: 3202 - protein, 78 aa, Homo sapiens
LTSAPSPNPQMLHFFGIPGLSMGGRDAWPKHLEQGTPYPLVATSPLLWPPEISLSAVAPSTALMGLFSHLLLVSRGNF

SEQ ID NO: 3203 - protein, 29 aa, Homo sapiens
MIALLCSPLWGVSPLLGRSGAPASPGCIS

SEQ ID NO: 3204 - protein, 59 aa, Homo sapiens
LESLSPCSPLPWHSCMHFKGSLWGLGFLPLPGLGPAPNPASPAPAHPHIGALLLLWCLK

SEQ ID NO: 3205 - protein, 22 aa, Homo sapiens
LVILWILFFVILKRQMRACINH

SEQ ID NO: 3206 - protein, 79 aa, Homo sapiens
LKRRVGKSADLKLFLLKKKKKKLCAAHSGVFFFRLLFSSPLPLLPFESFFSSPCPPSPPDRMADSTPVSINFFFLLFLI

SEQ ID NO: 3207 - protein, 98 aa, Homo sapiens
VEEVCQAHVLSVLLLLFLLQHHPDPRLVLPPPGGGGHPAPLGPDAQDGVAAAPREDVCAHLGHVHLCERGHCHLPAETLGSAVHPLGCLVPLCLPWPR

SEQ ID NO: 3208 - protein, 20 aa, Homo sapiens
VWRRRGWTSHIAMWWCVMGS

SEQ ID NO: 3209 - protein, 83 aa, Homo sapiens [sequence omitted]

SEQ ID NO: 3210 - protein, 67 aa, Homo sapiens
MSSGMHWMWMTTALSTRGLRAAGPRSMLTSSAPSAGLSMSVGGRSGSSSPQGRKRPCGTATATCPTT

SEQ ID NO: 3211 - protein, 42 aa, Homo sapiens
MRSTLLLTCSAGVSYRIPWQLAVDTCRAVRRPVGAVGVLQRQ

SEQ ID NO: 3212 - protein, 80 aa, Homo sapiens
MLVAPCSGEGLRHPQRRSGQDQGVLGFFLSLPQHIACSQGSSFVSLLLLPGLWSGHHHLLPTLSTASSLSPRLHAILFHM

SEQ ID NO: 3213 - protein, 268 aa, Homo sapiens
VLLSFPRLTLFCNFLFMSLEATKWWEIRDSNIWWPCDVSKLLDFSQFPFPIKWVVLGIRGSNSAGNRGRNRQLRPRTSPKPRAATGTTVRGASVKRTGGPAPAQPSPPGPLPPTPHGPHARAETGASPGSPVRQPLPGPAPQREAAWGRRRVERAAEDKEEVAVENKKELSAVCPDAGRRWGQARPDLHAIPAGVPACLREGKDPGRLLPKVRLLPKVRLLPRGPHKARQTLQPDPDAPPSRMHMRGTLPETHLPERPGSTRANWRAD

SEQ ID NO: 3214 - protein, 52 aa, Homo sapiens
LGKRTRAPSWGTGSFAFYFFSCSQGAHVFETDRISSSMWRQVDFSRLAGISF

SEQ ID NO: 3215 - protein, 38 aa, Homo sapiens
LPCSLSTTPSSTDQRTRSSMLTMPVSTSFSLAVTTWFC

SEQ ID NO: 3216 - protein, 86 aa, Homo sapiens
LIFFSYWSLRLWLLQGHHELGLLVSSFPCLVSFSQFSQKPCPGPCSSPSPQPLTPATSGRMGSSSHSPRSQSPPWMGLQPELSMRP

SEQ ID NO: 3217 - protein, 87 aa, Homo sapiens
LIFFSYCRSLRLWLLQGHHELGLLVSSFPCLVSFSQFSQKPCPGPCSSPSPQPLTPATSGRMGSSSHSPRSQSPPWMGLQPELSMRP

SEQ ID NO: 3218 - protein, 142 aa, Homo sapiens
LRKSTLWGPTPCDVCLVACSLFYLQSTVPIRAARSASCLIWKTTTLGSQRNDGSLGVSKIGSEWPHGDGGPVSGSLGPPEMVLHISILKTGEVRPQTSQAFSFHWKLDIFPPGFLGKPNGAQKAVWTSVWVLSWSSDVYCYF

SEQ ID NO: 3219 - protein, 41 aa, Homo sapiens
MKCGSILCSGLAASPGRICLQTGLLLYQLVPGPAGTRKIHP

SEQ ID NO: 3220 - protein, 78 aa, Homo sapiens
MCFLNPPTPNLSPLCLSLLLAVFLFSFSSALVSWTPLLCPFFLFITQSAVIVISMASSLHSSSCFQPPKPEHCLASNH

SEQ ID NO: 3221 - protein, 75 aa, Homo sapiens
LVRQTFPTLCPAGAHASVAAAADPDSWKRTIRGGPKSCTSPQSSMVHSLQRRKSGSHMQQHITFPSPGRHILVSR

SEQ ID NO: 3222 - protein, 17 aa, Homo sapiens
VQFLKSPVVYMMMIMLL

SEQ ID NO: 3223 - protein, 66 aa, Homo sapiens
LGRAGSARGLLCISLHFSDVWSSPGPGRSGVRAGAGGVGLGVGAAFPAAGEPFASELDPGDITALG

SEQ ID NO: 3224 - protein, 241 aa, Homo sapiens [sequence omitted]

SEQ ID NO: 3225 - protein, 19 aa, Homo sapiens
LPGTLHLKSLCLCCVLLSA

SEQ ID NO: 3226 - protein, 152 aa, Homo sapiens
MAVQAAILSGDKSENVQDLLLLDVTPLSLGIETASGVMTILINCNTTIPTKQTQTFITYSDNQPGVLIQVYEGERAMSKDNNLLGKFEFTGIPPEPQGVPQIEVTFDIDANGILSVSAVDKSTGKENKITITNNKGHLSKEDIERMVQEAEN

SEQ ID NO: 3227 - protein, 16 aa, Homo sapiens
VWFPIRKLFFLLGFHL

SEQ ID NO: 3228 - protein, 20 aa, Homo sapiens
MFWSCIMCHCLLALSSLLLL

SEQ ID NO: 3229 - protein, 97 aa, Homo sapiens
MGERAGQFLANKRWLTALTSAVNSAHLASGATPASAVTSTTVATGWRSLVGTTNTSMSAVAKISSTSTTCSGLPPSSTLLACSWASSLPLSLEALRT

SEQ ID NO: 3230 - protein, 86 aa, Homo sapiens
LRRLTALTSAVNSAHLASGATPASAVTSTTVATGWRSLVGTTNTSMSAVAKISSTSTTCSGLPPSSTLLACSWASSLPLSLEALRT

SEQ ID NO: 3231 - protein, 66 aa, Homo sapiens
LGSGALVPASAAAAAGSQWPGVLGSHRPAASIAPNLRGAAAGALGRRGSAKAADAIFLPRRSQGNR

SEQ ID NO: 3232 - protein, 36 aa, Homo sapiens
LENWKQGKRWRIWSLFLSWKMFWGPATSDILCSPRL

SEQ ID NO: 3233 - protein, 28 aa, Homo sapiens
LPGVYSVSLAFSLILMDIVWARGRDGWL

SEQ ID NO: 3234 - protein, 63 aa, Homo sapiens
MRVPQLGSATSCGVALAPGAAATSPPAQPPGCSSPTRLGCLCCTLSHSGWNPGPGTRQRSLLR

SEQ ID NO: 3235 - protein, 40 aa, Homo sapiens
MTQLLSRVSGLPSASAGSARAQSASAPPTDPGKVSGLPQS

SEQ ID NO: 3236 - protein, 51 aa, Homo sapiens
VDLLPHQAHPVHRVPDDHAAGWLQWTTCLVLSGSGFGGSLSVVEPVTEAVL

SEQ ID NO: 3237 - protein, 13 aa, Homo sapiens
MRYVFILIACVLQ

SEQ ID NO: 3238 - protein, 177 aa, Homo sapiens
LEPRDEKIKMPLLRGLLWLQVLCAGPLHTEAVVLLVPSDDGRAFLLRSRLLHPEAHVPPAADRGASLQCVLHQAAPKSRPRSPAAGAALLHRPRRTGDEPCREFHGNGFPGPTQLTPGECGLPAPSSLLQHASAPVRTGSEGQVVGCPRARGETGEGLSLAFLSSLMFTSRNGLVGC

SEQ ID NO: 3239 - protein, 208 aa, Homo sapiens
MGACATPATAAAPVAWAGRGGTASWPVPLGATEPPAIWSAPATTTARVSLPRAPAAAAPASMARPASTPVPLASTGLAARGCAGVNMEPPATPSVADASALPASTATSVRGGVSQVHLERAATSAVTVTGGHPVTLSPVSAFAHQGAQEPPVTWIAEGASLGPAAPCTVTAGVGLTATLSVGSVTVWMATWGPRAGKVGPSGSPRTRP

SEQ ID NO: 3240 - protein, 109 aa, Homo sapiens
MRPSEGCLIAPALLTTLSQPLPSPHPQGLTAPHPLQAGTQLGISPAVTDFVQAKDLAGPDAVPSPRPGMGVGVPELMWCPLSLSEWLRLIPLTYLQSPSTQGRPDVATG

SEQ ID NO: 3241 - protein, 25 aa, Homo sapiens
LCWGTAAVVAAAIAQTAGSACRSPA

SEQ ID NO: 3242 - protein, 31 aa, Homo sapiens
VRSLHVAILPLLKALNGPVANDLLSRQERGE

SEQ ID NO: 3243 - protein, 34 aa, Homo sapiens
VIATIMDVDRCRGILQPNWISICICFLIPSSLAE

SEQ ID NO: 3244 - protein, 90 aa, Homo sapiens
VAAAAAGPAAAAAAAAAATTSLLPRGAAARAPRAAHPAVLSAARPRWRALPPPVPAAPSVVLRLALGLPRQPQPQPQRHPQPQPQPQPQA

SEQ ID NO: 3245 - protein, 56 aa, Homo sapiens
LPAAGFHLARACCFLRARPLPPVLLFVPFCFPHSLPQLIARHLGPCPHSPSTLQGT

SEQ ID NO: 3246 - protein, 40 aa, Homo sapiens
LGLQVIIRFEIFKVDTKLFQQCRQLSVLLWAMVLLVKHVS

SEQ ID NO: 3247 - protein, 160 aa, Homo sapiens
LRLTLLLPAARHLRGGPPTRPRATRFKKKKKAALSPLLPFPASARTPSLPPAPPAQAPLPWKPSGFARISPPPPLAILQYRGKADHGESGQQLAAAPGDGRLPLLEAVRRLRGQDCGPLSALCHGQLLAQPVPQVLLLPGAAGRHRHVLLHQKWHDPLQK

SEQ ID NO: 3248 - protein, 65 aa, Homo sapiens
LRATLWGPAPWFLLLPLPPPDPSGPACSAPTGLQPASHRTFGGPRLERSAGVGAPRPQTLQKEQQ

SEQ ID NO: 3249 - protein, 27 aa, Homo sapiens
VMPNPVLCTQVTLWLCPLLMPALQQLS

SEQ ID NO: 3250 - protein, 81 aa, Homo sapiens
LDFTLHFSLELFLVINFLGGTGTRGPAARPRIAAAGQRGLGRAPRRSGAAQAVMVTRDLKDRVAMYHPLECPPRNSVKMMT

SEQ ID NO: 3251 - protein, 31 aa, Homo sapiens
VSRRRLKSELLGFAQIGVGRACLWGAATPYC

SEQ ID NO: 3252 - protein, 46 aa, Homo sapiens
LASSYDFTNGSSKLLSSALTACAPASVRARFLAWGSNHVDKMGSVS

SEQ ID NO: 3253 - protein, 74 aa, Homo sapiens
MPPGRLLCPLGLQPEACPSALGPDPRPPAACNQTLFASSRHPPSPAPHTVPGSPLPRRSVPLPSPVTFACWSPG

SEQ ID NO: 3254 - protein, 28 aa, Homo sapiens
LAVFHSLCVHAAGGASGPGGAAAEYFWL

SEQ ID NO: 3255 - protein, 132 aa, Homo sapiens
MRAFGRTRSTLRVRTLQPPTACAGVVAWPAAGSRICAALSRCTGVGRSDFKPRQQPMKKQILTANAVRQGPANYSPGAKPRCHFFLQVQLIGHSHVHQATHRPTHLRLQHRAASTAQTPHAAIYGKRWPSLL

SEQ ID NO: 3256 - protein, 58 aa, Homo sapiens
LLSLLVTSVFRVTPLPLPTVPSSLPLGPLLHPICVSLPPVLSCLDPLVHSLPWASSEP

SEQ ID NO: 3257 - protein, 25 aa, Homo sapiens
MRAPCFGSLTCTQARTWTRCWSGRT

SEQ ID NO: 3258 - protein, 58 aa, Homo sapiens
MCKLHQEIPLHSGLPAAGHTQEELCLPIWLLLLPGLLLHMCQEDPGAGLLPWFLWHAV

SEQ ID NO: 3259 - protein, 128 aa, Homo sapiens
VAVFCQVYLLSCSWLRFADLCIHCGLLGTSNWKFFTPAMAGRNFGPQLRLPDSGRYSQSQLPSELGEREKGKYKKTQPCGLTPYSMIQAHSQLCVSRVIMVKRMVTSKDNHRASLLTLVRTRFLSLVL

SEQ ID NO: 3260 - protein, 81 aa, Homo sapiens
LKIQYQMHLRSFLLLLLLHRVLQGKAILWLPVVLWIIFQILVTVKFLHDPVLLAIRLLTQCQSHCTMRGARGILSASWKQT

SEQ ID NO: 3261 - protein, 117 aa, Homo sapiens
MAATPRLWSSTGRSCSFGSALTTLWAVPWPTARSESAWPRWRTTRLPCSTSTSTWSWHIPCATTRSCRGPGPPSAAPTWTSMTTASRGMLCCRHRLPLRRAWLLWMRSWRGHWPRES

SEQ ID NO: 3262 - protein, 72 aa, Homo sapiens
LLLPESPASPSSTSVCALLLPPFPSTAHSSSSRPLSTLSKHITGDLIATRSECVCCHPAWPGQAWHSLGFHA

SEQ ID NO: 3263 - protein, 176 aa, Homo sapiens
LASSPALWAASTTLLTMCTSRAPTCGWPCTRTTCRPPIPTMSTRRATWTRHLVGPCSSCGPTTRSGCRCRRTRPTASTPRSTSTPPFQDSCSAPHNPRGGSCCPGLLPFSGRATFSITKNLLEKKTKAEQRRPWPWPEETNLLSPCMQAEIVSGRGWPEFLSPKCLCSVRAAPHRP

SEQ ID NO: 3264 - protein, 92 aa, Homo sapiens
VCGSEPDFISPKASRPEETRWVLSVLAAVGGTGASSPSPVLPARSPESRWSSSRPPTSSQPTFRGERRQAGPSSDQASPEVGTPLCVPLRSR

SEQ ID NO: 3265 - protein, 58 aa, Homo sapiens
MRKAHAWPPPACSLAVVRLRAARRGRQAGIQPGSLETLTHPPSHLGSAYPPALREDEA

SEQ ID NO: 3266 - protein, 39 aa, Homo sapiens
LNLSLVVALTVPYSHRMGCCLLSVLENMGNLVIIQHRMS

SEQ ID NO: 3267 - protein, 52 aa, Homo sapiens
MKWRSPMSIIAMSAAGSNPHNLWVVALQCHRSNHLIFELGVLSFSETMSCVT

SEQ ID NO: 3268 - protein, 120 aa, Homo sapiens
LRGAPARWRRRRRWPSRRAPGTAAATAAASSVWRASCAPASRRATTTRRTRCTGPCSSGTCPRASTRRPGSSCTREPCSSSAMASKTVQQTCPCWSWSPWRRRKWRWLTSCWKIWLKCSA

SEQ ID NO: 3269 - protein, 46 aa, Homo sapiens
MSRFALPALGIPLFPSASAALPFSGAQLWSFHPARQRGEGARAASG

SEQ ID NO: 3270 - protein, 36 aa, Homo sapiens
LLSVASGSSLPLFLLVPINELFSALGKKSPPAIMRI

SEQ ID NO: 3271 - protein, 25 aa, Homo sapiens
LEFWMIACVILTASITSIPTKSSPK

SEQ ID NO: 3272 - protein, 24 aa, Homo sapiens
REEAQLVMLLLLLLPPPPPLLLIL

SEQ ID NO: 3273 - protein, 46 aa, Homo sapiens
LQPERGGALSPVLLSSSASELVSSSRRDSLCQLSREKRNFQLKTLS

SEQ ID NO: 3274 - protein, 92 aa, Homo sapiens
VASAGRAISAGALLPPPGASAALDVCARRRLSVAPKLLPGSDLVRRLRSRTLARKEPRDSCGQSRVESWAFSLRVFWWFPPWSLTIALREPC

SEQ ID NO: 3275 - protein, 59 aa, Homo sapiens
LAAGLGPLRKSIRAAAAAAAAAAAASAAEEDSAARAPPATSAAESHRHRMPEKHVGTQH

SEQ ID NO: 3276 - protein, 88 aa, Homo sapiens
MSSCGTLTWATSSPAHPTWAPGCGQVCISSCPTWASMRSSRRCLSGCDFRSEAQAVWTRLRWAGSSTSPTLTAWASQRWSWCRWWWTE

SEQ ID NO: 3277 - protein, 68 aa, Homo sapiens
IFKLDVSTVLLFCLESGTRGASACAAGAAGNSGCFSLSLSFLGAHFCCFDSRAYQVRSEGGRRQCPFC

SEQ ID NO: 3278 - protein, 82 aa, Homo sapiens
LEENVPGIEFFLEAKYSEVDGRGLRSSTFALVPVFAHLSILQSLVPAAGAASPVAISAQHLCYSHVTPGDPGAGAGQGPAPS

SEQ ID NO: 3279 - protein, 65 aa, Homo sapiens
VVLLLVAVRLHTLLSCPLEQPAGTEWILEEGVTTGPPRKPRADIYNLRSPDEFIVGQNQALIEPG

SEQ ID NO: 3280 - protein, 68 aa, Homo sapiens
MFTAQSMCSPLCTPSQPGAGAHCSGLPQGGSRVSPSAPGGMGVEPGILNTSLRGGINKTVSVPPAPRS

SEQ ID NO: 3281 - protein, 38 aa, Homo sapiens
VMCARFRKAAHSRFLGVSAAVGSWGQGPGCWGVGRGSR

SEQ ID NO: 3282 - protein, 96 aa, Homo sapiens
MKRGALRFYLPCYIVFLGKAVLPYSKPLPSLPTQDLGTGGARHLMPCPRLAGPSISAGELSSADKPAWHGALPLLLVPDPFCPEENFLSPGDAWPR

SEQ ID NO: 3283 - protein, 44 aa, Homo sapiens
KPPVFLHLALLYLQAGSPEIPAPNPPCTLGPALLPPERTFLQLF

SEQ ID NO: 3284 - protein, 13 aa, Homo sapiens
MTLSRSLFFILFF

SEQ ID NO: 3285 - protein, 21 aa, Homo sapiens
VSTRCFVVSVFLLFTLPESVL

SEQ ID NO: 3286 - protein, 27 aa, Homo sapiens
MTEITSNSSQTFLVATLGILRFSLACP

SEQ ID NO: 3287 - protein, 22 aa, Homo sapiens
VLGLLLLTIISLSLPAFIFSPI

SEQ ID NO: 3288 - protein, 31 aa, Homo sapiens
KGILNAISSLLALGHFLLDPALLSAIVKDQP

SEQ ID NO: 3289 - protein, 36 aa, Homo sapiens
RQRMKLMVCMVTVLLPIFELLEYKLCLCLECPSQSD

SEQ ID NO: 3290 - protein, 36 aa, Homo sapiens
TALPGALLAPFCPSSVSAAAGSCSGAEWLTSVLQMH

SEQ ID NO: 3291 - protein, 28 aa, Homo sapiens
LGCRLSAAALGWCAVVRPRLTAASATQM

SEQ ID NO: 3292 - protein, 14 aa, Homo sapiens
MDFIYQIALFWISW

SEQ ID NO: 3293 - protein, 16 aa, Homo sapiens
VVSVASLAGLLFLRFS

SEQ ID NO: 3294 - protein, 35 aa, Homo sapiens
LPGQVLPGSLGAVAWVLTMLLKLVQNSSQSLTSAS

SEQ ID NO: 3295 - protein, 36 aa, Homo sapiens
MLPCGTCHGAGTAALSRPAVVAAAAAAAGPERRSCH

SEQ ID NO: 3296 - protein, 59 aa, Homo sapiens
RSGFRLETLAGLRSRRLKQPKVSWSLCDSGKKWREHSVSPTSFLTLLPYLSFFPTGLSR

SEQ ID NO: 3297 - protein, 39 aa, Homo sapiens
VSVEARTRGGAGTAAAAAAAGGTLIPVLRTPRASPWLTS

SEQ ID NO: 3298 - protein, 69 aa, Homo sapiens
RPPPPLLAAAMESSTFALVPVFAHLSILQSLVPAAGAASPVAISAQHLCYSHVTPGDPGAGAGQGPAPS

SEQ ID NO: 3299 - protein, 28 aa, Homo sapiens
MERSMMILLMAASMTMTSTQLWSFCCVH

SEQ ID NO: 3300 - protein, 26 aa, Homo sapiens
LPSGALLVAGVSSAFLVSSTRRLAGF

SEQ ID NO: 3301 - protein, 38 aa, Homo sapiens
LLAGYFIDTLKVLHMIRKQLWKMTAFISLNILPYGTDQ

SEQ ID NO: 3302 - protein, 15 aa, Homo sapiens
LVFFGGGFSIVLSMC

SEQ ID NO: 3303 - protein, 31 aa, Homo sapiens
VEGGSPSWLAILLLCVEVLPVACPNPKLEEE

SEQ ID NO: 3304 - protein, 17 aa, Homo sapiens
LLLLFVSLWRGFCGPEP

SEQ ID NO: 3305 - protein, 41 aa, Homo sapiens
VMSPRRRWLFGGSEERLLLLLLLLVAPLQKSSKNSAVGSVR

SEQ ID NO: 3306 - protein, 68 aa, Homo sapiens
LGRRAAAGGGGHVATAVAARAAAATAAAASARAAGRPPTLPPRGSPSSLHLAPLVPLARPGAALCFSL

SEQ ID NO: 3307 - protein, 89 aa, Homo sapiens
LLFSRLRVVGLHPAFRVLLRGAPVSSPAQAPLQAAVGFRFASGWGCCFSSPTWILYPSETLEPLWSSLHLMTLRGWSFQVLPERNVPSL

SEQ ID NO: 3308 - protein, 21 aa, Homo sapiens
MVLLLVTFLSMDDLLGYGESA

SEQ ID NO: 3309 - protein, 36 aa, Homo sapiens
LALLFPFAPVAAAERGGSMCAVSGAIPGPVAPEPRV

SEQ ID NO: 3310 - protein, 29 aa, Homo sapiens
MRRAARVTFLQILHAVHLCPRRTTAAHDS

SEQ ID NO: 3311 - protein, 31 aa, Homo sapiens
MAWTGGAGVTFLQILHAVHLCPRRTTAAHDS

SEQ ID NO: 3312 - protein, 46 aa, Homo sapiens
LSLVYFSGVTSVPSFKGGALSLWVICTDCAKQSICSPNVNCQGAAN

SEQ ID NO: 3313 - protein, 77 aa, Homo sapiens
VRSIRQRALRRAGLCACAVWVAPDSLPRPAPPRLRTLAPLSAAALPRSSQPRVRQYVQLGQQGCPPQEGAGALPDGG

SEQ ID NO: 3314 - protein, 48 aa, Homo sapiens
LKMNPHFKSSCLLEVALPVTSLHFSIHGCYSRKSSFLKHISRHMMRLM

SEQ ID NO: 3315 - protein, 30 aa, Homo sapiens
LGPLLLCTLLPSSQISAHLPPRLAAPQLAG

SEQ ID NO: 3316 - protein, 27 aa, Homo sapiens
VGTPTRLRAFSSLLFFPFASLLTSPAH

SEQ ID NO: 3317 - protein, 10 aa, Homo sapiens
VFMGARFLFL

SEQ ID NO: 3318 - protein, 64 aa, Homo sapiens
MGSRVLGSCSWPVLLWAGLWAAHGRASDKLDQHCPCLRGVSLVFFFLDDYLKGKGRQRVRKGLA

SEQ ID NO: 3319 - protein, 77 aa, Homo sapiens
MQKSFTFLVHCLGSFTWYSLRSRLSEQPRQPDLRMNLSRQSLTKHLQEPSWGESMRRWVRSGQESKHHLATKPKLCV

SEQ ID NO: 3320 - protein, 81 aa, Homo sapiens
LSSKIKNKPVISCAACVSAAIWAKQSCCSRQARSSYEEKQESTADANFSEKTTGQFYLACSFLLFDNNKDYFNLPGISALS

SEQ ID NO: 3321 - protein, 114 aa, Homo sapiens [sequence omitted]

SEQ ID NO: 3322 - protein, 108 aa, Homo sapiens
LTPASKCVCVCVCVCVCVCALAVIYDLQWPVCGFGFHCGVENVVCLPSAYVCLGLCVHPSSPALVLRQTKEEGLRTFLASKAPLQACCPTHPAIPRPACIVVCTFICS

SEQ ID NO: 3323 - protein, 64 aa, Homo sapiens
LPPPSLARSPARRLLPLSLPLRMAATAAPPPLKMAKPRPPRLYSPRRHCLPGLVVRGSRAAKAS

SEQ ID NO: 3324 - protein, 52 aa, Homo sapiens
LRAQKAAEASLGPLLSCPWALPWLLSFPTAQPKESPLQLTRVQPPEQRVPQP

SEQ ID NO: 3325 - protein, 95 aa, Homo sapiens
MATASGAGLLFLPTPQAPSHPHAQANVSHTGSGGTDPEQQALAPAPSPAFRVNSCTSWNCLRVLPPSDHGQVQVQCFGSDVSGQAQHSSKEIAAS

SEQ ID NO: 3326 - protein, 51 aa, Homo sapiens
LLTCGCLALSSSACPLLVLPPTGPAHLWLLCSDSLRLSLSPAHLLMLSSVP

SEQ ID NO: 3327 - protein, 26 aa, Homo sapiens
LSSRRCPLLLLPPPALLTCGCSVLVP

SEQ ID NO: 3328 - protein, 27 aa, Homo sapiens
LPRLAPVIPALWEAVASDAGGSPEVRS

SEQ ID NO: 3329 - protein, 21 aa, Homo sapiens
LGMLLCLCIWSLFGATVDRHL

SEQ ID NO: 3330 - protein, 19 aa, Homo sapiens
MNTWMKTSISWWLCMTTPL

SEQ ID NO: 3331 - protein, 18 aa, Homo sapiens
IDFFILFCLLGRTWLQGF

SEQ ID NO: 3332 - protein, 17 aa, Homo sapiens
ITVGGIMILAGLTSSHL

SEQ ID NO: 3333 - protein, 34 aa, Homo sapiens
RTALMIITAGLLACPSHPMHPFCQIIRMREWKTS

SEQ ID NO: 3334 - protein, 7 aa, Homo sapiens
LIVLLFA

SEQ ID NO: 3335 - protein, 31 aa, Homo sapiens
MWCLVIAVSVALPCFPGWVFASHHGGRARGD

SEQ ID NO: 3336 - protein, 44 aa, Homo sapiens
MFKLSPIGLLFMFVNIPGTNFNINNLKFYGSIQSCVKPESRDQT

SEQ ID NO: 3337 - protein, 41 aa, Homo sapiens
LKAASWGLFVITALQRFKGGDGACAGLSSHPSEELMFTGYA

SEQ ID NO: 3338 - protein, 13 aa, Homo sapiens
ITNISFCGAMLTF

SEQ ID NO: 3339 - protein, 49 aa, Homo sapiens
ICSMNENGKFPGLPSAQLSCLPPFASAAHASLSSVFCAWTLWAHPGHGG

SEQ ID NO: 3340 - protein, 20 aa, Homo sapiens
LSWRVTMKIILLSSGMPLLL

SEQ ID NO: 3341 - protein, 14 aa, Homo sapiens
LLLINIYMYLCTSS

SEQ ID NO: 3342 - protein, 38 aa, Homo sapiens
ILKVESPAPAAAAAAVAVVVAAAAAGERARAGKPQSEI

SEQ ID NO: 3343 - protein, 17 aa, Homo sapiens
VSACRFFLCLFSALPRP

SEQ ID NO: 3344 - protein, 7 aa, Homo sapiens
RVFMFLF

SEQ ID NO: 3345 - protein, 35 aa, Homo sapiens
TSSTRPRWRTLTSTTSLWCSSWGSTARARPPSSDT

SEQ ID NO: 3346 - protein, 32 aa, Homo sapiens
IGLVSKTNAIISLKKKEIGIQVNTTVPLNMPT

SEQ ID NO: 3347 - protein, 21 aa, Homo sapiens
KMDPQRRFLVASLVAGVCIET

SEQ ID NO: 3348 - protein, 10 aa, Homo sapiens
MWIQTFLSVL

SEQ ID NO: 3349 - protein, 61 aa, Homo sapiens
KTWPLQSVLSTASSLRPLVMMVQSASVSKAGKGSSSSHGVAAALNQDLDPDPKCHVFNVSK

SEQ ID NO: 3350 - protein, 20 aa, Homo sapiens
MKSQAHYCLVLMSLVLKILE

SEQ ID NO: 3351 - protein, 7 aa, Homo sapiens
LLYGILF

SEQ ID NO: 3352 - protein, 17 aa, Homo sapiens
VLGFQQLLLALPLAAFS

SEQ ID NO: 3353 - protein, 91 aa, Homo sapiens
LGADLFLTQLLLLVSSPPLFREEDHGQGWAKHQGLTQCFSHANVCENHMKTDSDLAGLERGLGFCFTLADSRPWRLYKWGQFGGNLMSKGN

SEQ ID NO: 3354 - protein, 72 aa, Homo sapiens
MLMLMFIICIWTKRSSVLQDRTILKLFRNRNRSPSQTAKSKAPYIEASRLRAERDLGNHLVSLPHFPFRPQG

SEQ ID NO: 3355 - protein, 35 aa, Homo sapiens
MVAPRAAPPAGAFLSGQAVFHGRELLAELPLLSKH

SEQ ID NO: 3356 - protein, 32 aa, Homo sapiens
MVAPRAAPPAGAFLSGQAVFHGRELLAELPLS

SEQ ID NO: 3357 - protein, 21 aa, Homo sapiens
MKFVDTVMILILAMVSQVRCT

SEQ ID NO: 3358 - protein, 25 aa, Homo sapiens
LWGFLLDADSVFLMCAFGLLCNSSW

SEQ ID NO: 3359 - protein, 95 aa, Homo sapiens
MMSFGFGFLPKNCKWCLLALLRILPLLQISEKRLECSGAHASHCDTAGEPRATAVGMTALFLLKSDLSKPLSYVWRLLGSWSTQIATANLRNGHE

SEQ ID NO: 3360 - protein, 79 aa, Homo sapiens
LNMAIPAFSSCQQISSAAALQICNGPFKHFSFTVSTMLSFVSRCHWSSIAEESEFLFLILVCYFSSSCSSCIIHQWYYV

SEQ ID NO: 3361 - protein, 43 aa, Homo sapiens
MAFLLLSLVHPLTTSHEFSELFSHSLCFVALSQCRGKNQMTAL

SEQ ID NO: 3362 - protein, 20 aa, Homo sapiens
VLGTMVLVIFLRANGVGTPA

SEQ ID NO: 3363 - protein, 31 aa, Homo sapiens
MRLTALFFLVNFMKSPFHSTGTCLKELCRWC

SEQ ID NO: 3364 - protein, 34 aa, Homo sapiens
LLHFRQCPVHAMVPRHLSSLWSLWLLSLAAPPVP

SEQ ID NO: 3365 - protein, 60 aa, Homo sapiens
LGGSSPWGLLALRLAVAACRRVSVSVRRLRVARLLLTVLLGPKSGASPLLAAASPEIDPQ

SEQ ID NO: 3366 - protein, 83 aa, Homo sapiens [sequence omitted]

SEQ ID NO: 3367 - protein, 25 aa, Homo sapiens
LLYIIYIYIISLRLSLLVYPPGLGI

SEQ ID NO: 3368 - protein, 14 aa, Homo sapiens
LIFISLGAFFLGKY

SEQ ID NO: 3369 - protein, 15 aa, Homo sapiens
LRLMGMFFQLAFWRM

SEQ ID NO: 3370 - protein, 51 aa, Homo sapiens
MSMCLSFTPPLSAATAAAAAAAAAAARIAAAPSLARRRYLLGQVRSSPEIL

SEQ ID NO: 3371 - protein, 47 aa, Homo sapiens
MSMCLSFTPPLSAATAAAAAAAAAAARIAAAPSLARRRYLLGQKFYE

SEQ ID NO: 3372 - protein, 20 aa, Homo sapiens
MFLFLFFSCMHSQEVVPISH

SEQ ID NO: 3373 - protein, 64 aa, Homo sapiens
LTKFTKRCILLTPLFNPLVACQCLCVYLDRHSFIVIQSIGRVYVSIFWQAYRCLRLMGKNQHEL

SEQ ID NO: 3374 - protein, 51 aa, Homo sapiens
LARGRIASRSCAALAAAGTPCSALSLGPETSHSPHTPPPQLRFSGGRGEGR

SEQ ID NO: 3375 - protein, 51 aa, Homo sapiens
MSVGRIASRSCAALAAAGTPCSALSLGPETSHSPHTPPPQLRFSGGRGEGR

SEQ ID NO: 3376 - protein, 57 aa, Homo sapiens
LDTPSVFLCLYGLLGFLPSQRALLQWCGLPGSLILADHGEHPGLPPLHPQGPLGPVP

SEQ ID NO: 3377 - protein, 58 aa, Homo sapiens
LNPAPSVFLCLYGLLGFLPSQRALLQWCGLPGSLILADHGEHPGLPPLHPQGPLGPVP

SEQ ID NO: 3378 - protein, 12 aa, Homo sapiens
VRMCAAVLWLFG

SEQ ID NO: 3379 - protein, 28 aa, Homo sapiens
MKCLQILFFSRMSTLESAGLFQVPRVIP

SEQ ID NO: 3380 - protein, 43 aa, Homo sapiens
MVPHRPFLCFFLVLFCFDCTVSFVVSSSCQNKREMNWTYVDKS

SEQ ID NO: 3381 - protein, 105 aa, Homo sapiens [sequence omitted]

SEQ ID NO: 3382 - protein, 97 aa, Homo sapiens
LSLSWRPRETLLRRLRLRVGTALLCGAGPGWQLPALGGEGGLPSGPPPKAVGPAAEARMPSRRRGGSSLIPDVGYLSEVDCPWPEHFPKIILSKISV

SEQ ID NO: 3383 - protein, 61 aa, Homo sapiens [sequence omitted]

SEQ ID NO: 3384 - protein, 25 aa, Homo sapiens
MTVWVAAFAVNHAQATQRHILGFWD

SEQ ID NO: 3385 - protein, 62 aa, Homo sapiens
IQIMAKRIWSLKICLTWYIRLLSQSQVTEHAFPTIYLQMHSILTLLELKRQIGEEDKINICK

SEQ ID NO: 3386 - protein, 58 aa, Homo sapiens
LVFLLLFSSFVFFFSLETGSSYVGQAGLESPGSSDPPASASGKVGLQARIAAPGQSLF

SEQ ID NO: 3387 - protein, 44 aa, Homo sapiens
MKPRTLAVSATAFKVAPLEFVPSDVRMCSEFLPSGGFVISLAQE

SEQ ID NO: 3388 - protein, 80 aa, Homo sapiens
MVRRFHTLWRVSFLDNSGSCCVARAALELLGSNSPLASASQRAGITGASHPTVCSPEVEPERKMRDCLGATTSTMSPCTG

SEQ ID NO: 3389 - protein, 22 aa, Homo sapiens
MNDRGQGVLSLGLCIPPSLALG

SEQ ID NO: 3390 - protein, 63 aa, Homo sapiens
MCVLAFLTTPLLCISFFHFLFQAFLFLPCGNSFGASDCSSSECAAIPVDPVPGLQLLHLCQLS

SEQ ID NO: 3391 - protein, 51 aa, Homo sapiens
MSTAFCPIHSSLGSMVMCLCILSPLCIASKSLRVCTKSYMKAMGKPGCQWF

SEQ ID NO: 3392 - protein, 43 aa, Homo sapiens [sequence omitted]

SEQ ID NO: 3393 - protein, 66 aa, Homo sapiens [sequence omitted]

SEQ ID NO: 3394 - protein, 63 aa, Homo sapiens
MELPLRAARPAPRRARSLLCGQVIGLAVLRPQAAAAPQRWSPKSSSSTWEVTSCSPWMALCSP

SEQ ID NO: 3395 - protein, 39 aa, Homo sapiens
MAAGAVFLALSAQLLQARLMKEESPVVSWRLEPEDGTAL

SEQ ID NO: 3396 - protein, 89 aa, Homo sapiens
MNFLTELSFGLLPFTLDVTCSSLPPAMIVRPPKPCGTMGVYLHKTLFLPATIHVRYDLLLLAFHHDCEACPDMWNSDISLLRYSLAQKG

SEQ ID NO: 3397 - protein, 35 aa, Homo sapiens
MCYLVSSFLIIWCLSKMRHRLVCRVEWERHFDLLA

SEQ ID NO: 3398 - protein, 66 aa, Homo sapiens
MQVQVTILFLATSCEKTNIWVTLVSTLVLLLVIVASAAIDHTRVVIQKLHIGKDFITSRTMQIDVD

SEQ ID NO: 3399 - protein, 38 aa, Homo sapiens
RLWWALIQLGYLRSIGHTLLETGKMANTCRLFCVTHWG

SEQ ID NO: 3400 - protein, 43 aa, Homo sapiens
MFFSWMVLMVVDVLQCLDIKILGMQHHMRGLKNKIKKEKRTQS

SEQ ID NO: 3401 - protein, 40 aa, Homo sapiens
IFVSALLMYPQQPELPDMSVIAALLIILPTADPFCETPGC

SEQ ID NO: 3402 - protein, 24 aa, Homo sapiens
ILLQLAQDLFPRLCPLALPSLLVL

SEQ ID NO: 3403 - protein, 53 aa, Homo sapiens
MLQSNFFFGLILLSSHSPIVDPDSNFPPNFCKLSMISESPDLQHYYIHYSPCT

SEQ ID NO: 3404 - protein, 109 aa, Homo sapiens
MQVQVTILFLATSWFPMAPVSRSSNNSGSSSDFKSSNNLKVFQIILSFQKIHIFQTIHVFRTIHVFQEAPSLPVNQVFQQIQSSSNYWSSTKSRSSRKIHVFQEIHVFQ

SEQ ID NO: 3405 - protein, 51 aa, Homo sapiens
VQEAATAAAAAAAAVAAAAAAAAAAAAAEAPVAAAASPATTTKKNPHQILT

SEQ ID NO: 3406 - protein, 9 aa, Homo sapiens
IVYFKLICL

SEQ ID NO: 3407 - protein, 42 aa, Homo sapiens
MYTFRKLSPYLNKIVFVCSSVLGQSWGGFFSNLSETLSANTL

SEQ ID NO: 3408 - protein, 40 aa, Homo sapiens
MSPRRRWLFGGSEERLLLLLLLLVAPLQKSSKNSAVGSVR

SEQ ID NO: 3409 - protein, 42 aa, Homo sapiens
IMEYKKTTKAMKKRRMFYLHPISKPLLSCYCMSLQAQYRASS

SEQ ID NO: 3410 - protein, 75 aa, Homo sapiens
LLFLLLVLIFPSLLGLQPGLLRNWKGGKTNLAYSNCFSSCARHYGSFSSLGLSVNKFGKLDNRPFTEMTILYIAI

SEQ ID NO: 3411 - protein, 18 aa, Homo sapiens
LSFWISLFLVLSTKDPFL

SEQ ID NO: 3412 - protein, 8 aa, Homo sapiens
LLLINLFL

SEQ ID NO: 3413 - protein, 120 aa, Homo sapiens
LGNYLEMRLKSSFLRGLGSWKSNPLRLGGWTILLTLTMGQGEPGGPQGDPWVPHELLLPSLCDSSHASSWGSGSITCAWRGGDSSSHPLVSGHILSNSPVAAVMCSSMGTHLSPFKGTLL

SEQ ID NO: 3414 - protein, 15 aa, Homo sapiens
MTITHVFMVLIRFVS

SEQ ID NO: 3415 - protein, 14 aa, Homo sapiens
ITRFIFALVSLAGG

SEQ ID NO: 3416 - protein, 37 aa, Homo sapiens
MSTKLVVLVLFLLAEWRLVFSNPVWWSPLLQSTLQRK

SEQ ID NO: 3417 - protein, 57 aa, Homo sapiens
LNQKLLFSSPASALLFFARPCVFCFKASKMGPQFENYPTFPTYSPLPIIPFQLHGRF

SEQ ID NO: 3418 - protein, 18 aa, Homo sapiens
VESFVFLLFSIRVSCSAA

SEQ ID NO: 3419 - protein, 34 aa, Homo sapiens
MWRRSLWTFSRSGSLRRTGRIVLVARAQSGVAWS

SEQ ID NO: 3420 - protein, 23 aa, Homo sapiens
LRFKVLLRVLFFMAPVPPQVFGQ

SEQ ID NO: 3421 - protein, 71 aa, Homo sapiens
VGFCLLACFCFIFALNVHPGLGCLPPRVLHYTSCLSLPERVARVLMPRDTIRRMDLSCHAGQGRAAGRAMS

SEQ ID NO: 3422 - protein, 48 aa, Homo sapiens
LWGKPARGALAQACLPGVLVVYPSVALESPPAPFHWVSPQTKPLDLSF

SEQ ID NO: 3423 - protein, 43 aa, Homo sapiens
LPSIPTWTTAKAFQLFLLPLLLLYNSFCTQKSESKSKFIMSFS

SEQ ID NO: 3424 - protein, 69 aa, Homo sapiens
LRRSTDKLSRAHGLQRVQANLKLLMSILLMLPPGSNEAWAGCPKLLIFILALPQLSQQRIHWSSNQTRE

SEQ ID NO: 3425 - protein, 11 aa, Homo sapiens
MGRGIIIWCCL

SEQ ID NO: 3426 - protein, 36 aa, Homo sapiens
LGRTLLSFIAFYSVTACAWGKTKVISEQNAADSRIG

SEQ ID NO: 3427 - protein, 93 aa, Homo sapiens
MMSVLSGAMWSATSRSARPSPAPMAGRRCPRLTAAVSDAKLPPSPACTRAVRWPLESAGLWTPAPAAPAWRAPCVARASAAHRSRVAPTRPLP

SEQ ID NO: 3428 - protein, 48 aa, Homo sapiens
LQGPTSGFPGSGFGPRRRGRKARAPAFPGLSLLGCLWSGQPGSREIQP

SEQ ID NO: 3429 - protein, 35 aa, Homo sapiens
LLLGVVALLPLCGKRIQALPRACGCGGPEVLVVPR

SEQ ID NO: 3430 - protein, 45 aa, Homo sapiens
MPAAVMSPRRRWLFGGSEERLLLLLLLLVAPLQKSSKNSAVGSVR

SEQ ID NO: 3431 - protein, 38 aa, Homo sapiens [sequence omitted]

SEQ ID NO: 3432 - protein, 36 aa, Homo sapiens
MGRGAGRRAKWKGGAPKALYFPCVSLCLWFISGGCA

SEQ ID NO: 3433 - protein, 22 aa, Homo sapiens
MHLALYFPCVSLCLWFISGGCA

SEQ ID NO: 3434 - protein, 52 aa, Homo sapiens
LTLRLEGVLIGDLSLGLMSVCLATFSSLLLDHIVVCFEYHSLGYVESRVASH

SEQ ID NO: 3435 - protein, 379 aa, Homo sapiens
MLLPALLFGMAWALADGRWCEWTETIRVEEEVAPRQEDLVPCASLDHYSRLGWRLDLPWSGRSGLTRSPAPGLCPIYKPPETRPAKWNRTVRTCCPGWGGAHCTEALAKASPEGHCFAMWQCQLQAGSANASAGSLEECCARPWGQSWWDGSSQACRSCSSRHLPGSASSPALLQPLAGAVGQLWSQHQRPSATCASWSGFHYRTFDGRHYHFLGRCTYLLAGAADSTWAVHLTPGDRCPQPGHCQRVQVTMGPEEVLIQAGNVSVKGQLVPEGQSWLLHGLSLQWLGDWLVLSGGLGVVVRLDRTGSISISVDHELWGQTQGLCGLYNGWPEDDFMEPGGGLAMLAATFGNSWRLPGSESGCLDAVEVAQGCDSPWGS

SEQ ID NO: 3436 - protein, 377 aa, Homo sapiens
MLLPALLFGMAWALADGRWCEWTETIRVEEEVAPRQEDLVPCASLDHYSRLGWRLDLPWSGRSGLTRSPAPGLCPIYKPPETRPAKWNRTVRTCCPGWGGAHCTEALAKASPEGHCFAMWQCQLQAGSANASAGSLEECCARPWGQSWWDGSSQACRSCSSRHLPGSASSPALLQPLAGAVGQLWSQHQRPSATCASWSGFHYRTFDGRHYHFLGRCTYLLAGAADSTWAVHLTPGDRCPQPGHCQRVTMGPEEVLIQAGNVSVKGQLVPEGQSWLLHGLSLQWLGDWLVLSGGLGVVVRLDRTGSISISVDHELWGQTQGLCGLYNGWPEDDFMEPGGGLAMLAATFGNSWRLPGSESGCLDAVEVAQGCDSPWGS

SEQ ID NO: 3437 - protein, 51 aa, Homo sapiens
LDCCLIFLTLSYFSPADEAAAEKMEAILVNGSHLSSWQRKKRKDPLVRNGD

SEQ ID NO: 3438 - protein, 58 aa, Homo sapiens
LTSFSCPIQAPVLAALLKLSLAPAPAPQPLAKPLLSFLLPPLSLQLRDGPGSSVSAVL

SEQ ID NO: 3439 - protein, 126 aa, Homo sapiens
LNLSPNLGDSKPESGLTKDARMSGEVSWMQAVCAGTRAPATDEVAGVHRSLLRSSRGFQGRLTRFLGRRFMTAEFLLEDPSSGSLIPQESSWKTRACEGSAAAPRQPDSQPRTAGVDMHGSLDAIS

SEQ ID NO: 3440 - protein, 38 aa, Homo sapiens
MARLRALPACFTRAQPPASTENVFWNQHSLQRLHTAFW

SEQ ID NO: 3441 - protein, 125 aa, Homo sapiens [sequence omitted]

SEQ ID NO: 3442 - protein, 82 aa, Homo sapiens
LTICRSGPDLPLVVRPIQLLLLLWLCEEVPSCCWLHIRKAVMGMKVKTWRFHFSHCFCLQDHPLKVEKLLCVVVNSKRQNSF

SEQ ID NO: 3443 - protein, 62 aa, Homo sapiens
LTRSRGPRRPALLLALPPRAPAPGSSRAGMLLRSRAASGPATCSPGKRTRRGAAGLPGVLPP

SEQ ID NO: 3444 - protein, 130 aa, Homo sapiens
LRCCHPLLTLLLLSPSAFTPLLFRITPSTLQGPGGPRNQDPEGGALLTSHRGSAREELSPVEQNGNHLQRSPDPKQDGRQLLGGAKSPGILSLGLRALESKGKPPSLQGFSVCLGCCSGQGGSPTPSKQK

SEQ ID NO: 3445 - protein, 56 aa, Homo sapiens
LQKPEVQEAATAAAAAAAAVAAAAAAAAAAAAAEAPVAAAASPATTTKKNPHQILT

SEQ ID NO: 3446 - protein, 52 aa, Homo sapiens
LQPPRESSARHQVTRPQPPGPQLRPASPRSGSCTLTLDSAAHGKNRIAPACN

SEQ ID NO: 3447 - protein, 32 aa, Homo sapiens
VMAAAICLVGINAIFSGGYCSLAVLQNWSMLA

SEQ ID NO: 3448 - protein, 56 aa, Homo sapiens
LLIWCLAWMPGLQALLVVALHSHPAEEDLLDWIFSGFLSDIVLYLPMKTLFFGLCK

SEQ ID NO: 3449 - protein, 26 aa, Homo sapiens
MLSWCCFLVAASPLRFHLELDVSYQI

SEQ ID NO: 3450 - protein, 206 aa, Homo sapiens
VGRPSPQAATWWAALPFFPPDPARSASCSSHQSMIQASDSFQFPPRSPPPTTSSPPVPQHSANSEARPLLPLPRTARSVLFSVPGPASFSSASFPTTPIIHEGRRSRACPTSAPENQSISPRPRRMQAAHTSGAPKPPGEEAEGAFCSRVVMGKAEGAREQRAWGGANASASGVRRPGAPGPERINRRLRCRLLPAKHHPPLVSLC

SEQ ID NO: 3451 - protein, 54 aa, Homo sapiens
MSGASSDRGLSCVSAARVLVGRACSSGARASRPDLGPRQGWKMMEEAEVEATEC

SEQ ID NO: 3452 - protein, 41 aa, Homo sapiens
MSTVKKMRGLLRSRLLSSLLLKAPLRLVSLFWRLCIRKLKI

SEQ ID NO: 3453 - protein, 42 aa, Homo sapiens
LIEFLWCSLACSSVFCISCSVMFKLRNALCGSSESHLWFSRH

SEQ ID NO: 3454 - protein, 24 aa, Homo sapiens
MPPCAAPSPLSLASAWHSSTSSGS

SEQ ID NO: 3455 - protein, 109 aa, Homo sapiens
MSMASTPAATTWATRTCSWSGSASTTTRPLLTSTCLEPFWWTWNPEPWTVSAQGPLDISSGLTISSLVRVGPATTGPRVTTRRGRSWWIRSWMWCGRSVKTATACRASS

SEQ ID NO: 3456 - protein, 41 aa, Homo sapiens
VAGSLCVLQIVTLMVAPMAWLEDKQIEDIGNGVIKMIDHEA

SEQ ID NO: 3457 - protein, 23 aa, Homo sapiens
ILPPPSQAGLMSVLTLLPLLPGP

SEQ ID NO: 3458 - protein, 52 aa, Homo sapiens
LVPVFAHLSILQSLVPAAGAASPVAISAQHLCYSHVTPGDPGAGAGQGPAPS

SEQ ID NO: 3459 - protein, 63 aa, Homo sapiens
MEFFIPTSVDLKILPLSACLGSAVSSLPWFSDDACNNAMRFAHSWVGGDIGAQVWVSDCVTPC

SEQ ID NO: 3460 - protein, 54 aa, Homo sapiens
MAMFLAGCGGPLLNDLLPCCSEDTAARKGLAHCGASQGTLVAPASDLVLSLVWG

SEQ ID NO: 3461 - protein, 27 aa, Homo sapiens
MVFIAASALAEVPRAGSQGARVSQEHH

SEQ ID NO: 3462 - protein, 52 aa, Homo sapiens
METSCSLWVSSELFCRSVKVFFCLLALHLSALPHSSWTQDKNLGLAGMVELK

SEQ ID NO: 3463 - protein, 64 aa, Homo sapiens
MTCQRPSLRSNCAAAGALSAAAAARAPRAPFGTHRSPPPAAPLSRSRAAAAVSPRRLGDAGHGR

SEQ ID NO: 3464 - protein, 42 aa, Homo sapiens
MFFNQSYTKCPCLSCLPSHFLHVFLSATLRQQDQPLLLSHST

SEQ ID NO: 3465 - protein, 48 aa, Homo sapiens
MPRASAPSLSLAYSLGAPAPPATPGLPKRLLGRPAQRAVRSVCEEPQS

SEQ ID NO: 3466 - protein, 22 aa, Homo sapiens
MESRRCGFSCCFFFFFSEALSE

SEQ ID NO: 3467 - protein, 111 aa, Homo sapiens
MKNTRAIILRTLLGLSPCSCLQDPLAFLSLAKGGGLCGLTTHTAAPVGLIQSVEFFKREKLKSLRRKEFCLQTVFELKTVASTPAGISSLLASSADSHLPASTIAAEAEEP

SEQ ID NO: 3468 - protein, 18 aa, Homo sapiens
MRILRGPYAALFAAVLTS

SEQ ID NO: 3469 - protein, 26 aa, Homo sapiens
MVFLTWLSCISLTLTKLVQHLPWATC

SEQ ID NO: 3470 - protein, 36 aa, Homo sapiens
MEVLFDSLLFSSFIFPSQSLLSRTSAFSHKPNGLSE

SEQ ID NO: 3471 - protein, 161 aa, Homo sapiens
MSSHLPFYVTCARWLLCLQTSHLHSRQKGEGKSKRCVPNKSILKTNKGRGSRRKFKKKKKKNKNRKAVVSLKAPSSRLLPVTHYPVMWPPLDSRQSEEVSVSKRHMDATDKIKFPWLKEKRTIEFGEAAGYVCHRRYKDMEPHEKMGEAAKKVHWVQVRSR

SEQ ID NO: 3472 - protein, 55 aa, Homo sapiens
MVFPAKPEAPSLLPLFSLVSFSGWPEDETPQTPHFLALVPGLAGPGIHLHCVGCP

SEQ ID NO: 3473 - protein, 43 aa, Homo sapiens
KCLSSGPGLLLRLFSFSPCNAGKSQSRHRNMPLIQCLCLAVTC

SEQ ID NO: 3474 - protein, 30 aa, Homo sapiens
LPSFVVSQRCAGLLLAALRIQGVGCQVQVS

SEQ ID NO: 3475 - protein, 44 aa, Homo sapiens
VTFIFFLVWICLLMHLFQNPKLHKCVNILRNKMNPTRRMIFSHT

SEQ ID NO: 3476 - protein, 33 aa, Homo sapiens
LAFLLSLISLFQRRPNLKSFPGSGSVHLIRQPK

SEQ ID NO: 3477 - protein, 15 aa, Homo sapiens
VTQVWGMMVTLLTHV

SEQ ID NO: 3478 - protein, 28 aa, Homo sapiens
LSPRRSLLPVLPPLCSVLVSAFIPEWIW

SEQ ID NO: 3479 - protein, 45 aa, Homo sapiens
MRNSSMRVTASRPPSTIFSPSCLSTSLSSSRKLPTLTSCSSSFCS

SEQ ID NO: 3480 - protein, 93 aa, Homo sapiens
KGSGRRTANREALGSWLGQQLHLSCLCSSGHLLMLRGSPPFQRLVPLSWNLAWAYAEAASTPLSQGLGGSIAPTPAAFAHGWPCPPLAQPKSH

SEQ ID NO: 3481 - protein, 20 aa, Homo sapiens
LATLLLLLLLLLLQLPLHSR

SEQ ID NO: 3482 - protein, 42 aa, Homo sapiens
LTEAASGRTFWLLTVLLWFSRIVCRCEINHEFRCSFDPREFC

SEQ ID NO: 3483 - protein, 16 aa, Homo sapiens
KCLARNTVGTSMILLL

SEQ ID NO: 3484 - protein, 44 aa, Homo sapiens
LLLFWKMWTSTKWFHWKQIVVLTMHPFPQALNSQQVPTRMMMSS

SEQ ID NO: 3485 - protein, 80 aa, Homo sapiens
IRKPARRKIQTTNPDFLLLLFMSVPVVSAPPFCPPAEGSRDGRPKASVARPAAVHEHHSPRDCGHLPDVLRSSLGGWQPH

SEQ ID NO: 3486 - protein, 11 aa, Homo sapiens
ILLYFVNIFFF

SEQ ID NO: 3487 - protein, 66 aa, Homo sapiens
MSAAGLSSPCPTFLFSSLVSPTLLLPQAVPDAEFRLSRLFLVPGKAERRSSNGLVLRASGENQRSN

SEQ ID NO: 3488 - protein, 33 aa, Homo sapiens
MAHRSLGLLGSSDLSTSASSIAGTTGTHHHPQG

SEQ ID NO: 3489 - protein, 20 aa, Homo sapiens
MLTKQIFTSAKLKLCILLLT

SEQ ID NO: 3490 - protein, 22 aa, Homo sapiens
RALTAILWKPPSSLAQASVVAP

SEQ ID NO: 3491 - protein, 110 aa, Homo sapiens
LRLGLSLILRSARERSSAAAGRKQFCKNNHTQPGNCLPLGLSLSRRPHSLQGGGHRIYRGKTSLPASRLQCCKLRISLDFVFPGNCSKTQNHICREPDCHGIRGAGHSYL

SEQ ID NO: 3492 - protein, 62 aa, Homo sapiens
LAGWLSAALRCAPAAPAARGWGCPAEPRDPPPSARTRTDKLILKVAVVLLLSKNGGPTGESG

SEQ ID NO: 3493 - protein, 87 aa, Homo sapiens
LGVSPGAALLTVLPVPAVARRSAGPAATLATDAGRAATPGSWPPRRLRPPWPSGPQAPPRHPPRTASSARGSPAPCSPSSSWPGSCA

SEQ ID NO: 3494 - protein, 63 aa, Homo sapiens
MSYLPTNPPGSILTCWLGVSLGSHRSARGGSTIYGRLLPRRKDVWFSQAKDVPKYRGLLYLQS

SEQ ID NO: 3495 - protein, 20 aa, Homo sapiens
MDPQRRFLVASLVAGVCIET

SEQ ID NO: 3496 - protein, 47 aa, Homo sapiens
MSVAIFLPFSVPLRRKNLTENTKKKKKKKKKKSSYHCLFCELFVLVC

SEQ ID NO: 3497 - protein, 43 aa, Homo sapiens
VVAVFSAAVTVIVFASLAKTSALDQDGGWTAFLTFTGPGGADA

SEQ ID NO: 3498 - protein, 46 aa, Homo sapiens
LLPRVLSHLAAAAPVQTLTLPPKAQPSPNNPQPCTDVGCESLCLSD

SEQ ID NO: 3499 - protein, 50 aa, Homo sapiens
LRARRAVLTAPRTLVSSLFSPRPSLGRAGTLAFPVPHGAAPTPDGSFSHT

SEQ ID NO: 3500 - protein, 68 aa, Homo sapiens
VCACARVCVLGVCVLGVCRGAERRAGPRGRKEAVELPGLGLRLPSSALLPRRRRCCSRCLWPIANGWF

SEQ ID NO: 3501 - protein, 43 aa, Homo sapiens
LRGAGGGAGWGQRWLRLLALGSACGRALAQSRLIAAVAPGATG

SEQ ID NO: 3502 - protein, 124 aa, Homo sapiens
LSFLTPSQSCGKGHSLSLSFLSCQPLRACSSGSESQWERARFAKPWAPGLGAPLPDPSGHGRGEPRGEEPRGGARARGRRQAALAPSRDALSFFLLFLLLPLFASPANAVGAARRSGAARDRAT

SEQ ID NO: 3503 - protein, 80 aa, Homo sapiens
LRPSRAESTRHSRTSEASRPRGTPPRRPPAGPRPLFPLVAATGALQGAAPACSAPDLSAKGSLCQRDFIHTDEPRIGIAV

SEQ ID NO: 3504 - protein, 47 aa, Homo sapiens
VTWTRKWSSSRHRWELGARLGVRPAGGGGLASAATEGSGVVVWVGGR

SEQ ID NO: 3505 - protein, 39 aa, Homo sapiens
LLLMLPCGTCHGAGTAALSRPAVVAAAAAAAGPERRSCH

SEQ ID NO: 3506 - protein, 55 aa, Homo sapiens
LTDQSRWSWRRGRQAADSANIICPRLKNSSSPIAGGATAAAGAGLLCGGSSPGHG

SEQ ID NO: 3507 - protein, 31 aa, Homo sapiens
VSRLSPRRSLLPVLPPLCSVLVSAFIPEWIW

SEQ ID NO: 3508 - protein, 68 aa, Homo sapiens
LCSHMFSLSLSLSLSLSLSLSLSQAGHHSVISSNKTSQVPKTFNSKRNPPSPRQKRRSHRPDGVEWTL

SEQ ID NO: 3509 - protein, 15 aa, Homo sapiens
MGFFLFYLPVAVLPI

SEQ ID NO: 3510 - protein, 42 aa, Homo sapiens
LARLPGSRALAGWVLGPGAPAPALTARLCAAGAAQPCCAACW

SEQ ID NO: 3511 - protein, 45 aa, Homo sapiens
LELLICCAIAIFPRAALSLDLAFQNCNSKMCKTGYSLLCCQGTWI

SEQ ID NO: 3512 - protein, 58 aa, Homo sapiens
VPSRREKGRSLCGVCCVHICFVPHTCSSCLGAYQVPSPVLGAGSTAVSKGDNIPCSQR

SEQ ID NO: 3513 - protein, 28 aa, Homo sapiens
LDHSGKLCWLGVGFCLPWGTLLSVDHTS

SEQ ID NO: 3514 - protein, 30 aa, Homo sapiens
LQQENFHLALLALILTGHQTRGTEGREDAR

SEQ ID NO: 3515 - protein, 105 aa, Homo sapiens
LTIGFHLARTFYVALLLWPMCCILCPQCATGPQRNVCLSNHGSGAVWQECKSGWRPGSPPGALHPPSRRTQQHDALRRSHCVQAPHLPGTALLRVPPSRNEGVHP

SEQ ID NO: 3516 - protein, 133 aa, Homo sapiens
LGPVCATGVGCPASGLLLLLVLLRRPAASPSRAGGESGCGFVLTVIVAFPRLGGLRAGLLLLRERAVLSDPTPSRGSPHTLGCVRVEWDPRTRVSLDSYGAERTKIPDGKLNEWQKPWWSRRKSPKRSNFGYY

SEQ ID NO: 3517 - protein, 44 aa, Homo sapiens
MVADKEVQTRTLLLSSLWIVCCLHLDSLISKNILSMQLGDIYRR

SEQ ID NO: 3518 - protein, 138 aa, Homo sapiens
LPLLALPARSRLLGCLWLGSAILSPTLGHCSASLPAGCPRSAPGPGEPSGRASLVVVEALAIINDRGYNDFAVSAGSHHALLLAETRDAFPAVHQLGSMELLLPHRRGEDHREVQPGRREDGEGQGSRDHAERSTRGA

SEQ ID NO: 3519 - protein, 43 aa, Homo sapiens
LAGVILVFAPSAFDIVQQRNGYGEAQSAACRAGVCEAILYFAE

SEQ ID NO: 3520 - protein, 44 aa, Homo sapiens
LAKLALCAGAPGLLRLSSSRPDFTPGSATGAWLPPNPIVQRRHP

SEQ ID NO: 3521 - protein, 35 aa, Homo sapiens
LGFFYYFFFFRTTLGLLFLCSTFPPFFPPSCAAAF

SEQ ID NO: 3522 - protein, 14 aa, Homo sapiens
LLLLSFLVLGLHIC

SEQ ID NO: 3523 - protein, 46 aa, Homo sapiens
LQGSGNRSGNANRSAARRLGCRLSAAALGWCAVVRPRLTAASATQM

SEQ ID NO: 3524 - protein, 44 aa, Homo sapiens
LFLSLLLSLSLSLSFFSALAGAVLEERKKERQRIAFIRYVLEIS

SEQ ID NO: 3525 - protein, 79 aa, Homo sapiens
LPSPSLPLLILSRSAALQCDESESSSHPARAFLLLPALFYFSFGRRRHCCTQLVSVPRFYPQVVPAAYGPGRLGYFCSR

SEQ ID NO: 3526 - protein, 131 aa, Homo sapiens
LRHRFFLAAVAACGGGLPTAALCSLRLSPAGSVNAAVAALCTQPRSPLLQSGSQSLSTIFYPRAAWIVVPSVRTPLLGPTTAASDISVSLFLWRFGLPISVVATLGVYGPLKNGRVREPQGAVRIQSRRGW

SEQ ID NO: 3527 - protein, 77 aa, Homo sapiens
VRARRCGFFSGLRRALLLVPALAGTRFLFASFPSARRRPAAKTRWAAPPIEITEDIRVLLKRKRGHLRTLLSASKDY

SEQ ID NO: 3528 - protein, 71 aa, Homo sapiens
VRARRCGFFSGLRRALLLVPALAGTRFLFASFPSARRRPAAKTRWAAPPIEITEDIRVLLKRKRGHFSFLS

SEQ ID NO: 3529 - protein, 20 aa, Homo sapiens
MCILWTWAWLECSGVLKILL

SEQ ID NO: 3530 - protein, 32 aa, Homo sapiens
MAIMLLCLLQLAAPLCSYSITIRFYLFWLNTP

SEQ ID NO: 3531 - protein, 117 aa, Homo sapiens
VSVPFHFHFCSLACVLPSARGKTYPEDFFRRGWGGAAGEPWPKRTMLGTVCVPSAAGHQKATWVPGALPLAVGPPPPLSGFPRNVQPRRPSQSLGRVMSAGPDRRPLGTLCCFVSFL

SEQ ID NO: 3532 - protein, 96 aa, Homo sapiens [sequence omitted]

SEQ ID NO: 3533 - protein, 95 aa, Homo sapiens
LLYKKLSLNLKHNLEGRCLLLKALLIHLTQVLSQQSHVPYEHRGFISFSYTTDPNMPGAMGTPALGEADVVIPRNSCHSGPDGRQEGLPCTAFLG

SEQ ID NO: 3534 - protein, 43 aa, Homo sapiens
MRRRRSAVGSVSARGCGGAGGSSLSGFSLGGGGGGSVDASSAS

SEQ ID NO: 3535 - protein, 29 aa, Homo sapiens
MEIDLENKVSTRCFVVSVFLLFTLPESVL

SEQ ID NO: 3536 - protein, 73 aa, Homo sapiens
LGEELGVMLFSKLFFGSSGERDRARCGRAGRGHPAGDPAGGSGRAVQDEPPVPHPRRLLLPSPHVSPGLLQLQ

SEQ ID NO: 3537 - protein, 250 aa, Homo sapiens
LGLRPLHQLLSTLASGPGAGGPWAPAHWPACPPLPGLPRLQLPPPHHAQPCPDGVRLPDPGQCQGHPQAPEAAGVAGSGEVAPGGGPVATAAGARPERLSGPQVPCLPSFAPAVLLPRMPMPWLPGPPGPAAGPLRRGCRGTAFPLPWTARCPGLRPQIPLPQRRGAVTPTPASPKPPWGPFRPPYSIFQTPGDHRPSQWLQGLPQRSPKMDTQPQRQQEKHMGIFFLYFNLIPLKCLFFIVFFIIYIIY

SEQ ID NO: 3538 - protein, 27 aa, Homo sapiens
MGWTFCFSFNSLFSFSFLLNLQHLASR

SEQ ID NO: 3539 - protein, 99 aa, Homo sapiens
MTGWSLLFKFQIDIPDKRCLSPCLSSDLHSTVPGKVEPPASPCPGGWKCKRKVSARSFFSESSLLGLQMAACSWHSLFSTHAQSYGGPSNHLLQPLETS

SEQ ID NO: 3540 - protein, 53 aa, Homo sapiens
LLSLITLLSFLPPQANPNISLQCVDFYPVNTVISLNDVQADETRSLGSLLHFL

SEQ ID NO: 3541 - protein, 30 aa, Homo sapiens
LGAEGSLGLWAAAAAHSALAALCGDRRPQT

SEQ ID NO: 3542 - protein, 54 aa, Homo sapiens
LSGLLCVLGTLLCATADPVVHQPPDPHLCLLIQCGHQLGLCQQLPQPLCVHRAL

SEQ ID NO: 3543 - protein, 116 aa, Homo sapiens
VGPSPTSRFFLLPSCCFGLATPSPLVPLEACPALILPMPSTARRLAPISTLGRGQVGQGWTSRRGVRLCSLPPASTERSHGFRYLPPVLFLLQPQFHQVSGLHGGLGQAEESGQGP

SEQ ID NO: 3544 - protein, 27 aa, Homo sapiens
MYVLSIMCLILLLSHPEAPSFVWTAKN

SEQ ID NO: 3545 - protein, 42 aa, Homo sapiens
MTLPFPGHPGSLWRRSHRCSLMSSLWSQLVPVAARRQKAVSE

SEQ ID NO: 3546 - protein, 76 aa, Homo sapiens
MHKKGSPILGSHTARVAGTSPPALPLLAQLPDASAEPHGPRHALRRPQQSPAPAGGAAAPAPGGRQPARSRSVRGH

SEQ ID NO: 3547 - protein, 54 aa, Homo sapiens
LAPAFGESGVWRLVVVISSDCFAVHGFSFCPVGLSAVCASLCPPPLPPAHLCLR

SEQ ID NO: 3548 - protein, 22 aa, Homo sapiens
VCVCVCVCVCVCVCVSLCLCIG

SEQ ID NO: 3549 - protein, 82 aa, Homo sapiens
MPAAVMSPRRRWLFGGSEERLLLLLLLLVAPLQNEPRRQSPFCQLRGGARFGSAVLMARIYRSWREDKLSSGCLRCIAVLEY

SEQ ID NO: 3550 - protein, 16 aa, Homo sapiens
VFLGVLLSLWIEPVKP

SEQ ID NO: 3551 - protein, 124 aa, Homo sapiens
LRAGSPAPGRERGGRHRHRPGVRRRSCGRAGGHQLGQGLLGAALCGAAAARRGAGFSQAPRGRVANGAAAGAERDRFAVAVAAACVPGAGGSAASLAAHRAPRFPLSRAGGFSEFSGGETDWSG

SEQ ID NO: 3552 - protein, 19 aa, Homo sapiens
LTCLAPAALSCFLPIVLAP

SEQ ID NO: 3553 - protein, 69 aa, Homo sapiens
LPSAAGRVGSPWFRPAPPSWSPFSRWAGLSGGDCLPGLAIGLLMMFDPAAGIAGNVISKLGSASVSSLV

SEQ ID NO: 3554 - protein, 35 aa, Homo sapiens
LAALILVRARLLLLGWVCIIPITPSGKRSQPPFKP

SEQ ID NO: 3555 - protein, 14 aa, Homo sapiens
VIFLIFLLPKIVHH

SEQ ID NO: 3556 - protein, 34 aa, Homo sapiens
VSSSPALTPWFLPWLPLVSTLAQPTPVCPSPSCF

SEQ ID NO: 3557 - protein, 25 aa, Homo sapiens
LFCLLFVVCFFATNFSIHSALLDKS

SEQ ID NO: 3558 - protein, 69 aa, Homo sapiens
LAKWFQATRLVWHGPVFCLLLRRVAAGTVGRAASGTAQVPARRSRAAGNHCGKSSQLFQTSETIIDFVQ

SEQ ID NO: 3559 - protein, 83 aa, Homo sapiens
LGRPCFSPDGPREGYQRPWCCHLPLLKCLPGAPGAVLANAGNIHFPAASWVLLSYLCLFSGGLGTISGDLGCADSKDPLWQEP

SEQ ID NO: 3560 - protein, 137 aa, Homo sapiens
LAWVNSSVTLALLGGDARPLAWVNSSVTLALLGGNAHPLPWVNSSVTLALLGGDARPLAWVNSWMTSALLGECAVPALPPPTSGAEARPGHPSAWTPLEGEGASLSRWAPLALPSLSLHTGVGWRRPQASYCKSFLF

SEQ ID NO: 3561 - protein, 77 aa, Homo sapiens
MGMRLGGRILSSLPPHSGVWLQPSLAPAGGREGAGSPSGLQGQVQGSPRMGFPGGGGWGGVLFLVPRGGAAPSHFIQ

SEQ ID NO: 3562 - protein, 86 aa, Homo sapiens
VVPVPAGTGLGLVRPWGLRLVFLCLDLHIYCIAGRDPQACPPCQDSSGSVWVPHSAPISPMSPAGAGSHPSLLAAAPSRPGIGSAR

SEQ ID NO: 3563 - protein, 72 aa, Homo sapiens
LWLALVRSVVFFPGVFLLISFLPGPSGARDRHHLPERGCPRCQALGSRLSGWPGGRRGDVGGPDVCLERPRS

SEQ ID NO: 3564 - protein, 10 aa, Homo sapiens
VAAAAMLLWL

SEQ ID NO: 3565 - protein, 25 aa, Homo sapiens
LRPRFLTKLVLLRVFLHDLTAVDSR

SEQ ID NO: 3566 - protein, 7 aa, Homo sapiens
MSLVLLL

SEQ ID NO: 3567 - protein, 60 aa, Homo sapiens
VIFFFSRKANGWRGSTTRFHSSNLCLALFLYLATRDQHAVMCAEGGIGQLHNLDLTTVWI

SEQ ID NO: 3568 - protein, 76 aa, Homo sapiens
LGLLGPGRVFWMGLGCSLVAGPPRSGPACWGFEEVECRVEVLFTRVLGTVPGTLRQAPRPAGPAGGARCVCTFQSS

SEQ ID NO: 3569 - protein, 63 aa, Homo sapiens
LLWGICLFSLFFLTSISMYVQRLKNNLERVHPSNSSSLEISASLRLRLYSTSSDYTTTINLLL

SEQ ID NO: 3570 - protein, 42 aa, Homo sapiens
VLEVTGAAATAAAAAVAALSAVAAEAAARPRAAQRTITGLGT

SEQ ID NO: 3571 - protein, 37 aa, Homo sapiens
LWHFASGLPSLLVTLLPLVVTDSWEDPPCPSLRFSKT

SEQ ID NO: 3572 - protein, 109 aa, Homo sapiens
LLLMPVLREDTELHLFWDLLWGRMVDSGILETCLGPPRVKATQHSRRAPEVWKLRRVIGITPTVDRGRQGVRINCLRVGESEMWGPYSAPRPGTVFLSSFLSPASEEHL

SEQ ID NO: 3573 - protein, 102 aa, Homo sapiens
LSVRPALCVLGPYLSMLLAGGPARCLLHTHHLREAPAGRRPVLPAAALHCPLHAHLPGPPGGLAALCVSRLSLLVPTAVGPPALHLFTAGRQGPGRWGSPAQ

SEQ ID NO: 3574 - protein, 201 aa, Homo sapiens
VPPQRPSAALCPSLGPAPALAAPLPNETGRDDQEDVPERLGAEYPGQELLSHGHPRLVQGGQDGHRVALPHRPLRGRLHAYHRGLPPQVLLHPRRGLPARHPRHVRQPPVPRHAAPLHPHRSSTPSLASRTKPRRTWTCPWSSAATRVTATSTARWTSARSSSWWATTPSAAPTSRSRPRRTAAWTRCSARSSPWPSCPAR

SEQ ID NO: 3575 - protein, 53 aa, Homo sapiens
LELQVPWVPEVPQVPLERMEMMGKLENLVVLVSVGLLGLRVLEDCPEQLASLE

SEQ ID NO: 3576 - protein, 45 aa, Homo sapiens
LLLLLFLVFCFSVPTQHIVYDSVYTYYLVIMKKLILRTLKCYTQC

SEQ ID NO: 3577 - protein, 35 aa, Homo sapiens
LSPTSCPADLLVTPLLAAHAAGTGAAEKGAPSSGK

SEQ ID NO: 3578 - protein, 70 aa, Homo sapiens
LRPGQDRARRPRRVLGASACLAAALAACHSVLARSPHRAEAAGWGGSGASTRFPAAGKPLDAPRGRATSG

SEQ ID NO: 3579 - protein, 14 aa, Homo sapiens
LSFGELTGICLCFL

SEQ ID NO: 3580 - protein, 19 aa, Homo sapiens
MFYKLLFLTFSHTLMIPAR

SEQ ID NO: 3581 - protein, 113 aa, Homo sapiens
MTYFLSFFLSCLLWPSDSCPRRPQPPPGPAAPGRAAPLGGRLRARGDGGPGRLEEAGGLRGGGAPRSWLAEHERPRSQALQVQMQREPGSRDDKIQPESVEVTPQWRDSSPCV

SEQ ID NO: 3582 - protein, 60 aa, Homo sapiens
LSGRQLMDLGSTPLRTQGTARGREGEGCRREELMLHTWMVIRLLWKYKKQFLFLILWILT

SEQ ID NO: 3583 - protein, 11 aa, Homo sapiens
VVLFWNFFQVI

SEQ ID NO: 3584 - protein, 46 aa, Homo sapiens
LKRLGLSLLVHASSASGQQVYKGGKRLLLDFFFSFFYKSKHLKMET

SEQ ID NO: 3585 - protein, 33 aa, Homo sapiens
VAEPRRGHLKAALASLGGAAPAAATNGSPPLFK

SEQ ID NO: 3586 - protein, 102 aa, Homo sapiens
VPLSQTCPTHMWERSLSLVLGVPGFRRLLRTAVGVRCGVVLSVTAGSPVYTGSGSYGALSCHLIGPGVQWCPLGGAQGPMRQCCPVRTYHRLVSLRALHLPT

SEQ ID NO: 3587 - protein, 86 aa, Homo sapiens
IGAGDAEQVAAAGQLGRQLGASGTVSRCFGHQPLPARPAPFSGLRALPAGLCAASGAAAALGAPLGAGGDREARVKGATGTLARYG

SEQ ID NO: 3588 - protein, 70 aa, Homo sapiens
MFPARRRAAVTRLSERLSLCFCLHSRLQDPAARPRPEQMEMGCHVVSCPMGKRLTCEELREASRKQPVKN

SEQ ID NO: 3589 - protein, 40 aa, Homo sapiens
MTPEILGLLGFIPSEPGLAFLGCKLRAGSRSAEPRFSHLP

SEQ ID NO: 3590 - protein, 27 aa, Homo sapiens
MVCVFLFCFSPPAGAVCGVGWGVRYVG

SEQ ID NO: 3591 - protein, 211 aa, Homo sapiens [sequence omitted]

SEQ ID NO: 3592 - protein, 27 aa, Homo sapiens
MTSILLQLPLPLSGSCLAVWCHELGVQ

SEQ ID NO: 3593 - protein, 37 aa, Homo sapiens
ISARVCPLFSSLLVAKCSWNQFDTGELRLKPRRNNHF

SEQ ID NO: 3594 - protein, 20 aa, Homo sapiens
RSLSSFTASSASLCLCCVCG

SEQ ID NO: 3595 - protein, 34 aa, Homo sapiens
LKMVIMKRWLPWRPKSVIKLSIILATSICHGTSF

SEQ ID NO: 3596 - protein, 47 aa, Homo sapiens
LAAPRLPARRHLVLGFHCSRWAGRFSVIAAGGGGGVTSGQPRNPTIL

SEQ ID NO: 3597 - protein, 43 aa, Homo sapiens
RLTEAASGRTFWLLTVLLWFSRIVCRCEINHEFRCSFDPREFC

SEQ ID NO: 3598 - protein, 15 aa, Homo sapiens
KPFRVMPACLLMQLF

SEQ ID NO: 3599 - protein, 28 aa, Homo sapiens
TQLREGFVLSSVLWCRASSSPAQPRRLN

SEQ ID NO: 3600 - protein, 32 aa, Homo sapiens
VAGAWAAGCLTSLPLAHSDLCSDPAASLFLGV

SEQ ID NO: 3601 - protein, 31 aa, Homo sapiens
VAGAWAAGCLTSLPLAHSDLCSDPASLFLGV

SEQ ID NO: 3602 - protein, 65 aa, Homo sapiens
VVGVCVCVCVCVCVCVWLWVSCAVLLEHRGKAVDAGSQLAETCRPWSLMIVPVPLWRSLTAWRCW

SEQ ID NO: 3603 - protein, 87 aa, Homo sapiens
MSLLLLPPPSLPPSGVSSRLSLPVSSLWRKSVPPLPLYSGGGCGGGAGGCGGGGGSGARAVPVRVSRRAPWVVHLQIAERRPRDRWR

SEQ ID NO: 3604 - protein, 31 aa, Homo sapiens
TRPLSSPLASLAVSAFRSLAEAEARERSKED

SEQ ID NO: 3605 - protein, 14 aa, Homo sapiens
KYKLCFLFGSIGVL

SEQ ID NO: 3606 - protein, 32 aa, Homo sapiens
KWKSMCLFAETVNAFLALTAVKISGAMTIKTT

SEQ ID NO: 3607 - protein, 10 aa, Homo sapiens
IIFMNVFSLL

SEQ ID NO: 3608 - protein, 27 aa, Homo sapiens
IFGRAAHSLLSSVFCAWTLWAHPGHGG

SEQ ID NO: 3609 - protein, 46 aa, Homo sapiens
LLLTLLLQLPTPAARRGPVPTGGLAEGAVVPRGPGTAVVCALGAWR

SEQ ID NO: 3610 - protein, 30 aa, Homo sapiens
KMAAVSVWGISAVRPGAPGSRLSFLPDSFY

SEQ ID NO: 3611 - protein, 23 aa, Homo sapiens
MWILRDRAVHELQAVLLALVLGR

SEQ ID NO: 3612 - protein, 15 aa, Homo sapiens
IMDFIYQIALFWISW

SEQ ID NO: 3613 - protein, 47 aa, Homo sapiens
LSPAPFSSLSLPLSFAPKSASQPRRVVTEPLRLFLARVLRPRLPRHE

SEQ ID NO: 3614 - protein, 35 aa, Homo sapiens
LTIHRRKRRRRRRRRPSGGTQQALLPAPAVAASES

SEQ ID NO: 3615 - protein, 27 aa, Homo sapiens
MKEQCGRSVLWMTTSAWPLQASPPMQG

SEQ ID NO: 3616 - protein, 24 aa, Homo sapiens
MLIRGCAPCSSFMQALGKAGAAAA

SEQ ID NO: 3617 - protein, 72 aa, Homo sapiens
MTPSSVGSVTGSSSAPSPGQAPGSPQGLWCWPGCRPWAGMGRCWRCRSWRSGCPGPQLACSSCCACASMMAS

SEQ ID NO: 3618 - protein, 38 aa, Homo sapiens
MRFRVSSGLSGSSPNIRISAGLAVTLSPSGLTGSEGHA

SEQ ID NO: 3619 - protein, 100 aa, Homo sapiens
VRLLCASSMWAPLCSCQSRVSSMEAPSVGSMRSTACPVPTRTIRGRPWKASSSSLVWSPLQVTMNSECVDGWVDGGWQVGRLQGHSWQRLWVCRGPQVPL

SEQ ID NO: 3620 - protein, 13 aa, Homo sapiens
IFVLTHIHVFLLH

SEQ ID NO: 3621 - protein, 23 aa, Homo sapiens
RSFLTSVKRLFVFLLSLLHFNSF

SEQ ID NO: 3622 - protein, 43 aa, Homo sapiens
KKMKGLFLLTTNVSVPGLLPGSSVLPKILMRTLWRETSELLFL

SEQ ID NO: 3623 - protein, 44 aa, Homo sapiens
VKLFLGTMWASMSRMCLSRMFVVATLLVTAKMTHQWKQLASLLR

SEQ ID NO: 3624 - protein, 9 aa, Homo sapiens
ICNCFLFFV

SEQ ID NO: 3625 - protein, 45 aa, Homo sapiens
RSLMSRMKMKCLMPLCCHPRSTEQAGCWTFYIPRGKGAMWSSWRA

SEQ ID NO: 3626 - protein, 38 aa, Homo sapiens
LMALQGLNIKAFVLKGLVYSLRNIVMSFNVLRVDQGLL

SEQ ID NO: 3627 - protein, 19 aa, Homo sapiens
LAFYLVLFLVLHWWSVFCE

SEQ ID NO: 3628 - protein, 55 aa, Homo sapiens
LIIVMVAGAAAAAAAQPSVRCCSLRGVLQRTSPIYFCSRLGLSMCLLPPARGFDI

SEQ ID NO: 3629 - protein, 66 aa, Homo sapiens
LLLSPGSCFLICISSGAGQVTTGGGMPEAARTGREGAPWIYSVNLLEGCWQFFLFVHHPALFNNCT

SEQ ID NO: 3630 - protein, 44 aa, Homo sapiens
LLGKRPSLWSFVTAALADECRPHFPPPWCHCLWTACQPHRTSYP

SEQ ID NO: 3631 - protein, 35 aa, Homo sapiens
MQAALPTAMVPLSVDSMPASSHELSLKMLKLAGCS

SEQ ID NO: 3632 - protein, 8 aa, Homo sapiens
MYFILVWC

SEQ ID NO: 3633 - protein, 88 aa, Homo sapiens
MGLLLPFFLSPLHVKYCEEIALALFRLCCLKCTVQQSSSSHCCCLPHHTVSFQIPRSSQQDDSLWLHFSMPGRIFFNLPFRFQSSPST

SEQ ID NO: 3634 - protein, 33 aa, Homo sapiens
MQKIRGFTVLTRLILNFWAQSVHLPRPPKVLRL

SEQ ID NO: 3635 - protein, 59 aa, Homo sapiens
VFPLKIRTTVLAGESHKRTRDLFKSLLLSLLTGIHRTLLIRKGYETHVLLQSPVVSVGA

SEQ ID NO: 3636 - protein, 178 aa, Homo sapiens
LGCVSWSQAAFLLSVRGQPSPHSHGQATQNEHDSRGPRPGAEPGAGSGRREGRVGVRGSSHRTAGTEARQALIRSVGTRDTEERCWAPGRCLLVPGWPQTSTASRKEPSASGAHQKPALSTRRASARPGHHPTSQGAGPVTDGSPRPHGQHRLTTALPRPGWSGRSGGAHGSHLGPWR

SEQ ID NO: 3637 - protein, 78 aa, Homo sapiens
LKRPRTSGHQTGWLPRSRSLRPGRPWHPYTLGLLPSSASLAPARLHPGLRLLVTGCVSPFCPWAAQSPQSRPSHAERT

SEQ ID NO: 3638 - protein, 33 aa, Homo sapiens
VRLRMLGRCSVSAAWLLLNGMTAFTAPCACLSI

SEQ ID NO: 3639 - protein, 24 aa, Homo sapiens
MKPVCFSAATSPRSCSGWCPPGPR

SEQ ID NO: 3640 - protein, 26 aa, Homo sapiens
MKPVCFSAATSPRSCSGWCPPGPSAL

SEQ ID NO: 3641 - protein, 111 aa, Homo sapiens
LWGAFCSCFLILFGVGTEGTSRPPVRLRECRRPGREAQMMGKQSHLEGVSWGQCQGDLTGQFILKQHYSVRFFWVRNSSWEVWSSGRRGGQKHPLVFLSHLEALSSSPRYW

SEQ ID NO: 3642 - protein, 60 aa, Homo sapiens
MERLSHMRPWPCLQAPAACQTLSPLGLYLAASQQAFAAGFTGFGGFCVLTIDSQAPESAA

SEQ ID NO: 3643 - protein, 43 aa, Homo sapiens
MEPLSAEPSAAAAAAAVPPLFFPGRSLLCGRAAGMDLSLRIPC

SEQ ID NO: 3644 - protein, 41 aa, Homo sapiens
LLRPSVLLLLQLPFLPSALLPNSLALLGNIDKLEPRSSWEF

SEQ ID NO: 3645 - protein, 47 aa, Homo sapiens
MLGFFVCLFVCLLFFFSTALVVPSLSLEQGWLFFFNKIAGAQDCFPP

SEQ ID NO: 3646 - protein, 19 aa, Homo sapiens
LFVTKTVILLLLPPNCIRP

SEQ ID NO: 3647 - protein, 56 aa, Homo sapiens
LDSKILSLSLLTGIPISLVARCTYTSSTAVRTDRRQSFHVALSKSHLTSRPQCPHL

SEQ ID NO: 3648 - protein, 10 aa, Homo sapiens
LDLFLFLLGF

SEQ ID NO: 3649 - protein, 54 aa, Homo sapiens
MFFCRNYGSFWFYVLSKMLSFFICLLIFVHLLLLSFLISDWPPPTGSAEHKYSG

SEQ ID NO: 3650 - protein, 54 aa, Homo sapiens [sequence omitted]

SEQ ID NO: 3651 - protein, 52 aa, Homo sapiens
VTGFWMADHSTFFFLSFLLCCHLPLISASFCDSLTEKEVEWNKIPQYSTIIH

SEQ ID NO: 3652 - protein, 40 aa, Homo sapiens
MWFTPASLVVCSFLVSSIIPRTSFSATCQKHQHQPGGTLP

SEQ ID NO: 3653 - protein, 49 aa, Homo sapiens
LVAAAAVVFSWCPAETAAAQGVAGPTQDLPGPSALRDKGPALAKADGQE

SEQ ID NO: 3654 - protein, 20 aa, Homo sapiens
LYILLLHLLLIKLVAPFTFL

SEQ ID NO: 3655 - protein, 43 aa, Homo sapiens
LLSHVLYMLLMKLLKGLNVTDVFGRMRLSVPVQLCPNAVLISQ

SEQ ID NO: 3656 - protein, 101 aa, Homo sapiens
MRIATTLAAEAAALPARHHRLLCLFPSLSPGPCIDLARAAPHCACQLSHALRLSTAGRQGQTSRGKRKQPAQTGTARVLFDQHWNWKLGFEEVKSKYNIVF

SEQ ID NO: 3657 - protein, 26 aa, Homo sapiens
LFCYSVKLFSTVLTLQLTVQLHSSWT

SEQ ID NO: 3658 - protein, 38 aa, Homo sapiens
VVVQILLALCYGFLRVFSWFCLASSGKCPKRLEHCIKS

SEQ ID NO: 3659 - protein, 8 aa, Homo sapiens
LTMLCFFF

SEQ ID NO: 3660 - protein, 53 aa, Homo sapiens [sequence omitted]

SEQ ID NO: 3661 - protein, 33 aa, Homo sapiens
MVPTAAIAVGGYFLGGVSSVHGVTLRPLLAAPA

SEQ ID NO: 3662 - protein, 92 aa, Homo sapiens
LCPAEPRCLLGWLAAARGGGWPFIWGALSLPGQALEQSSSGSCLHLQDVQQAARRRMPATHPPPVPSLSPVGHSRFCLFPVYCPQCRGLCCP

SEQ ID NO: 3663 - protein, 9 aa, Homo sapiens
LSVSLLSLL

SEQ ID NO: 3664 - protein, 69 aa, Homo sapiens
LQPLPPLLASAVAAGDCGSLRVPLAGREVPLLFPLPFPKSCLLVLSLKKILQSLLILFLGVTIFEAKLT

SEQ ID NO: 3665 - protein, 37 aa, Homo sapiens
MQRPWVCVFIALSCWLPAAPPVPGRALGQRLSAPPPS

SEQ ID NO: 3666 - protein, 34 aa, Homo sapiens
MIMINEDTALLVLPCTILPMTRGLASYCILRTSS

SEQ ID NO: 3667 - protein, 25 aa, Homo sapiens
VITFYSTMYMYGIVLINELGKDVIN

SEQ ID NO: 3668 - protein, 35 aa, Homo sapiens
MAPTSPPVSTLGLLLFRRTTSGPPSSKTARAVVVP

SEQ ID NO: 3669 - protein, 14 aa, Homo sapiens
LRFPMGLACGAWAL

SEQ ID NO: 3670 - protein, 23 aa, Homo sapiens
RRPRACTSLAVSSPSASGAFSVE

SEQ ID NO: 3671 - protein, 45 aa, Homo sapiens
KPKKMKGLFLLTTNVSVPGLLPGSSVLPKILMRTLWRETSELLFL

SEQ ID NO: 3672 - protein, 41 aa, Homo sapiens
LWVCECLCVLLFTSHLLKSVYVRGWGVCVKESEEEKEREIN

SEQ ID NO: 3673 - protein, 21 aa, Homo sapiens
ILRDRAVHELQAVLLALVLGR

SEQ ID NO: 3674 - protein, 40 aa, Homo sapiens
KILLIYFLIMLISNEDSCLKIFFNLMVSIFCKNHVNLFHS

SEQ ID NO: 3675 - protein, 41 aa, Homo sapiens
LSLLCPPPPPSAFALLSSFSPEVRAASSPLVLFLPSLCSLL

SEQ ID NO: 3676 - protein, 21 aa, Homo sapiens
IRKAFVLCGFLYFEFFDQKTD

SEQ ID NO: 3677 - protein, 38 aa, Homo sapiens
KQRKVHPSLVSRTRRLVQVCLFWTSSMPSNQVPLTMTF

SEQ ID NO: 3678 - protein, 31 aa, Homo sapiens
LLPISLKGLLLVGLLCTVLQVSSAKGASRGK

SEQ ID NO: 3679 - protein, 53 aa, Homo sapiens
KGLQKTFLSHIFLLLISQQLKFQLMDSILPVKTSSPENCASWHPAVPKYYLTH

SEQ ID NO: 3680 - protein, 93 aa, Homo sapiens
MRFLISIICTWRFIQERITGADLNHGAHKWGGCSSGHGKNFLLQLETAFCVAGYHADSTNTNPHLDAVQTPDVPPISVSLGNVSMTERLKDRV

SEQ ID NO: 3681 - protein, 33 aa, Homo sapiens [sequence omitted]

SEQ ID NO: 3682 - protein, 74 aa, Homo sapiens
MWRSSARASVVMTVFALRGEGMCDHFQRLTCIPQIVWMSYNLNLQTQYSQTLGSDSLQASCTSPRKRACFPLDM

SEQ ID NO: 3683 - protein, 40 aa, Homo sapiens
MASFLEACETTNPSIKKRPLIRRRLLVSFLGTHSGFLQSR

SEQ ID NO: 3684 - protein, 162 aa, Homo sapiens
MPLHLAATSALRRLPATGPRHHCPTAPMLSMPPAPFAGPGLPASMAASASFSRARWIRLPGAPCCCAHLPTQVPTSCSPEGALHVGHSLLAQPHQMDMLDGLCPSPQLWPPKEVPKISTPVMLMGPSAPALSWVDGGKPSPMALPFLGHPTSCRRHCVPLGE

SEQ ID NO: 3685 - protein, 43 aa, Homo sapiens
MSCRSCLRCRLKSVKLMSSSLWTTTAVSTWTASLLRSRPSTRI

SEQ ID NO: 3686 - protein, 61 aa, Homo sapiens
MSLLLHPAPLGAASVIHALPGPSTHCCECASPEPVKRQLSILETQIIRALPCTEEKGSTRP

SEQ ID NO: 3687 - protein, 246 aa, Homo sapiens [sequence omitted]

SEQ ID NO: 3688 - protein, 22 aa, Homo sapiens
LAYILLFLDFFLIKRLLQCLSC

SEQ ID NO: 3689 - protein, 51 aa, Homo sapiens
RPFSAVFAPSMLASQVPPLSSLRIRRKQTPLLSRICSSVSSTSSTRYVTLA

SEQ ID NO: 3690 - protein, 19 aa, Homo sapiens
IYLRQILSFFLSPIFSGSL

SEQ ID NO: 3691 - protein, 61 aa, Homo sapiens
LNFPVPLLGCLLFRCPFAPQTTSWSALSSVAGSGDGAPGRRPKSRVRGPLHHPPGPTPGPR

SEQ ID NO: 3692 - protein, 47 aa, Homo sapiens
LLLLTTTTTTGAASAVPGVSSCSGHTAPGDCSSSNQNLGLTGTLAPK

SEQ ID NO: 3693 - protein, 13 aa, Homo sapiens
RGFTMLAMVVSIS

SEQ ID NO: 3694 - protein, 74 aa, Homo sapiens
LLPRVLSHLAAAAPVQTLTLPPKAQPSPNNPQPCTDVGCESLCLSKNQALLETFKQRLDNYFSRTERKLMHQKR

SEQ ID NO: 3695 - protein, 13 aa, Homo sapiens
RYFLLLFFLFEFL

SEQ ID NO: 3696 - protein, 87 aa, Homo sapiens
LDFQLALAISPAPLRGTAPAPVSAVPLTLAPPSGSPWTVTQPAPPLLVATGWEWLRGYLLLAACQREEGGGKKKGGGVEGGGPGPGE

SEQ ID NO: 3697 - protein, 25 aa, Homo sapiens
MYKPGFFFYTTLTHLLHSFSCEICE

SEQ ID NO: 3698 - protein, 45 aa, Homo sapiens
MHQVSGPAMTLSLCWASPCCWEPPGPWPSFLLASSCCPSCSSSPS

SEQ ID NO: 3699 - protein, 13 aa, Homo sapiens
ILRLLEITLLMTS

SEQ ID NO: 3700 - protein, 43 aa, Homo sapiens
TARSFFSALVRFLFGFLPASGATRVARQQPLGDLVLGSCPAWG

SEQ ID NO: 3701 - protein, 44 aa, Homo sapiens
RQNPGLLTSQWGMLFTLQLTLGLPGALSLGCLMRDVQGFSWVGV

SEQ ID NO: 3702 - protein, 13 aa, Homo sapiens
INMFLAGLSGSCL

SEQ ID NO: 3703 - protein, 39 aa, Homo sapiens
VCMQRPWVCVFIALSCWLPAAPPVPGRALGQRLSAPPPS

SEQ ID NO: 3704 - protein, 23 aa, Homo sapiens
KASLLMVLTFGIGSMYPGQSTSN

SEQ ID NO: 3705 - protein, 33 aa, Homo sapiens
MASCSLLSFIASCLYSVFWETAWSSWSLWSARS

SEQ ID NO: 3706 - protein, 64 aa, Homo sapiens
IRRFSGGWLLSAAGCSSTRPPSQPQPAAPTLPAPSRPVSYCRRHRRGSGPGPDGSVQRRLQDDE

SEQ ID NO: 3707 - protein, 72 aa, Homo sapiens
RKMKAVVARTGAAAVSGEGRRMQRPPAWSAGPGAATRAGRGGSTPWAPHSPPQVLRMASRETRKWTPWLLES

SEQ ID NO: 3708 - protein, 42 aa, Homo sapiens
LMYWKCFLTFGSLCSHCPHPRPTTKNPAEAETTKRQSSLLLQ

SEQ ID NO: 3709 - protein, 35 aa, Homo sapiens
LPKTCARGLLIALSPSLVSRPLPRLAISLLYFLSL

SEQ ID NO: 3710 - protein, 90 aa, Homo sapiens
RSRPRIWAWRGPWCPWPGFPRPERCVWWGMVPLWTCCCWSCTWRMSAAVVGGPWRTCNAYPGPWALLPPSSSGKWQNECCSRSTGCRAQS

SEQ ID NO: 3711 - protein, 32 aa, Homo sapiens
ICLLIFVHLLLLSFLISDWPPPTGSAEHKYSG

SEQ ID NO: 3712 - protein, 57 aa, Homo sapiens
RIPVMMLMSLSEILSVLFLLHCTEPLRVECEVLIYVCLVELSYQEHIDALKDNPRRV

SEQ ID NO: 3713 - protein, 87 aa, Homo sapiens
MPPEDFCAWKISVNRLLLHLRLHPHDMLSLSPSPLFSLLSLLSSLLSLSSLSRTHTLESQLPYWELPNGEAHIPQGTDVFSQYLART

SEQ ID NO: 3714 - protein, 15 aa, Homo sapiens
TGPPTAAWVLFLAWP

SEQ ID NO: 3715 - protein, 65 aa, Homo sapiens
RSWGGTVCLVWVTSPTCPMSWPSFMKPCASPALCLSLFLMPPLPTPLSWATTFPRTLWFLSTSGL

SEQ ID NO: 3716 - protein, 11 aa, Homo sapiens
MKKKMLLYWIL

SEQ ID NO: 3717 - protein, 28 aa, Homo sapiens
VRDAVSCVIPVIALQALSPSTWSLCPGR

SEQ ID NO: 3718 - protein, 52 aa, Homo sapiens
LANPLPGSKCLQLGVSGALATSGAASCGPITLFSKRTCQRLGVLTAARTKVG

SEQ ID NO: 3719 - protein, 13 aa, Homo sapiens
LPAISLPLLLSGV

SEQ ID NO: 3720 - protein, 35 aa, Homo sapiens
IIGKCCTMPLSVWFLVVAGLGPSDSWRLCRLPASL

SEQ ID NO: 3721 - protein, 43 aa, Homo sapiens
RNTAKSTGRSEMWMLLLHLRGHLSPAPPKMSCSPPERALHVTK

SEQ ID NO: 3722 - protein, 41 aa, Homo sapiens
ICALGPGLLLSLPSIGAQHPLPAHPSDSNSSPAPRPCVHFS

SEQ ID NO: 3723 - protein, 33 aa, Homo sapiens
LLLVFSPVLFSPLLRKACQGVGERDANTKVENS

SEQ ID NO: 3724 - protein, 53 aa, Homo sapiens
LSRGRRKRRKHKSGKQLMTSHGVPAVSSGRCLPGLPSHTLGVLAEGTWLVGLS

SEQ ID NO: 3725 - protein, 23 aa, Homo sapiens
LPLLLLLRLLAEAGGSSGGGGGG

SEQ ID NO: 3726 - protein, 41 aa, Homo sapiens
IEFLWCSLACSSVFCISCSVMFKLRNALCGSSESHLWFSRH

SEQ ID NO: 3727 - protein, 11 aa, Homo sapiens
LTSILFIFQCL

SEQ ID NO: 3728 - protein, 16 aa, Homo sapiens
LFILGALWTLVIINQE

SEQ ID NO: 3729 - protein, 115 aa, Homo sapiens
RTSASRWWIWRPWAGCWVRCCCWLSLASPSLSTSTMAPGSSAAVAKLRSPSPKALTTRRSSLTTRPTGRPSPAPRTTPSPRRHRCPQSPHPPALPPQAVPLSPPQRPELAEAPRR

SEQ ID NO: 3730 - protein, 52 aa, Homo sapiens
LNSPAALGFFVASFVIGARPTPQQPCPRDLQLVLILAPPTLVWVFSSTEKSR

SEQ ID NO: 3731 - protein, 25 aa, Homo sapiens
LQLLGFLWLPSLLEPGLHPSTEKSR

SEQ ID NO: 3732 - protein, 24 aa, Homo sapiens
MKSIRKAFVLCGFLYFEFFDQKTD

SEQ ID NO: 3733 - protein, 32 aa, Homo sapiens
ILAKRLRAVLAFAATWLGQLTQVSCLPSSACL

SEQ ID NO: 3734 - protein, 57 aa, Homo sapiens
KKNKLRTTLYVHLQMPQLMLVGCLSAFCDNEHMDFCLLNSVDPFSQLPGAWIFTSNC

SEQ ID NO: 3735 - protein, 55 aa, Homo sapiens
RHLALRPGYVSPRARVGLLPGPLAARVHGVPGIFRVFWHLPPLPGAHLPAPVRQP

SEQ ID NO: 3736 - protein, 21 aa, Homo sapiens
VAGSLCVLQIVTLMVAPVFHD

SEQ ID NO: 3737 - protein, 37 aa, Homo sapiens
LVAFWCLRLLWPLLSLWRQMMLEIDFGFSWSWNLCNV

SEQ ID NO: 3738 - protein, 59 aa, Homo sapiens
LWISLRDHPKRRKVTSHSCPLAALCRNASSAAKRPEPLGQSCPGKPGQPTPGSEGVSRE

SEQ ID NO: 3739 - protein, 11 aa, Homo sapiens
LVVVYRLAIAV

SEQ ID NO: 3740 - protein, 14 aa, Homo sapiens
LLGFCLLLWRCSVC

SEQ ID NO: 3741 - protein, 16 aa, Homo sapiens
LGKEFLSFFSFFLSQF

SEQ ID NO: 3742 - protein, 53 aa, Homo sapiens
MLRYRGSGSLLCGPFLQSDFALLSSPHSPLHLPHQKREVGATTALSAQAPVSW

SEQ ID NO: 3743 - protein, 115 aa, Homo sapiens
VSRLAPARSGDRGARGRGEARTGLRWARELCREEGRRTMDWGWGMVGIPASANPSNGGAHRAVGSEGMFSPGPDRALSGFNLSWSSRHRFMKRYRCVHSSLELIRPPTPTSGKRF

SEQ ID NO: 3744 - protein, 47 aa, Homo sapiens
MYIFIYTCTYISSTTFGSLSSCFSGLKPVLHDKSGLVTGDNCVLLGL

SEQ ID NO: 3745 - protein, 48 aa, Homo sapiens
MFSTSFLAANFSPIVFLLQQGEKVLCGPRRAVKLRVRGSVRGRMCVRV

SEQ ID NO: 3746 - protein, 66 aa, Homo sapiens
LHLLLKATAALLTSTLSPPYSLRRKSRRARMLCKSSMSSWWKRGLRPSACSCCTAAWPRATSRAEN

SEQ ID NO: 3747 - protein, 18 aa, Homo sapiens
LVSMMLLIWLQKGQLRQP

SEQ ID NO: 3748 - protein, 77 aa, Homo sapiens
LWAAFLTLDACGQPSSPWMPVGCLPHPGCLWAAFLTLDACGLPSSPWMPVGSLPHPGCLWAAFLTLDACDLVSMGAS

SEQ ID NO: 3749 - protein, 77 aa, Homo sapiens
LVIMWEWLPVHATGLQLHCLNGAMSHRGGRQGAGHLITRAVTSQGVEGGGGYGTPCLGCFCGACGLWAPTSMGLQEP

SEQ ID NO: 3750 - protein, 110 aa, Homo sapiens
MPRWVLWAGARARFWAEASPGNPVSSLLASDPVWSGLHGCRAWGGKFRSWLCLCLMWMSSSHAQGHLRLSLLSPGYWEESLRASLPLLPCPGHTLYLLICSSPPCRLLGR

SEQ ID NO: 3751 - protein, 28 aa, Homo sapiens
VGSGLGSALGRLLLHLLSAGLRDTRATL

SEQ ID NO: 3752 - protein, 104 aa, Homo sapiens
LAQAGLSLMLGVPLWRWGSPSPCAAALHRPCRNNTSWTSSLGPRPGAGQAEEPSGQPCPQSCPPRASYPLPPHPRWPQTRQGSSCLRSPSLLPPSFSSSLSSHS

SEQ ID NO: 3753 - protein, 156 aa, Homo sapiens
VCLFAAVTMPFPSVLEWLLADASSPCSLLSNCNLNAPSGSPGISLRIFFLFLRQSRCDAQAIAQWRDLGSLQPPSGSRGSSTARNFLLLTQATVFCVAGLQEVRPALQATPVLGLLLSSSFLRVTEPGREVGCGLPCPYSRLLQLPPCWTHQQQSK

SEQ ID NO: 3754 - protein, 215 aa, Homo sapiens
VCLFAAVTMPFPSVLEWLLADASSPCSLLSNCNLNAPSGSPGISLRIFFLFLRQSRCDAQAIAQWRDLGSLQPPSGSRGSSTARNFLLLTQATVFCVVWAPAADIPHMSVCLLVGLTNSSTWSLMPNQVQTTLLFCVTLCEASCKLDSLPSAPSPKAGLQEVRPALQATPVLGLLLSSSFLRVTEPGREVGCGLPCPYSRLLQLPPCWTHQQQSK

SEQ ID NO: 3755 - protein, 38 aa, Homo sapiens
MHTASMHVSHTLATLAASALQSPSPRPLVGSLVHTGGK

SEQ ID NO: 3756 - protein, 83 aa, Homo sapiens
LNSVHAGLELRPCVFSRLLIRRGALGAPAWVAVPSVCGPQFLGGAWTLALRGRPVPRSVATDPRTLFAGDSRSLRLPRMMACD

SEQ ID NO: 3757 - protein, 123 aa, Homo sapiens
LNSVHAGLELRPCVFSRLLIRRGALGAPAWVAVPSVCGPQFLGPRRGFVGAPGDIWAVLAVSGSRARSLPGLTAADLVLHFLGGAWTLALRGRPVPRSVATDPRTLFAGDSRSLRLPRMMACD

SEQ ID NO: 3758 - protein, 170 aa, Homo sapiens
LASAFLFSLLIILFLAAESEVSPCGGLAPITWWSDSYPSLRLHWKISQPQCMGNPFPRLVPALPLPTPEPGPQRMAMPRAWQRSGASTGSCSALALGPREPSSTPAQQLGTEERSSILTRTAPRSTRCLQPPTSGATFSSSHSPMRAPSQGHWSVNCNPFSSPALHLFLV

SEQ ID NO: 3759 - protein, 154 aa, Homo sapiens
LTIFLLLSSLSSYLAYLSIHLRVCLQPPPVCPSVQLPVTLCIFLSIHLPTHPSLRLPTSRPSPPGLQSHGPGLRGHGQPSPAGSGAGAGCHCAGCGPLSTPGPMWPPGLCPRCCCRRLQGLLGYWTVSETWEEAGWPLAASPSWRRRVCVCVCE

SEQ ID NO: 3760 - protein, 32 aa, Homo sapiens
MPRAGLIGPSGGFSVPQAAVAISGADWLVPWP

SEQ ID NO: 3761 - protein, 12 aa, Homo sapiens
MFGGLSLTAFLA

SEQ ID NO: 3762 - protein, 28 aa, Homo sapiens
VIMMMNLVPSLFFIALPHQQSALSHQAS

SEQ ID NO: 3763 - protein, 64 aa, Homo sapiens
LPLYPLHRKWAGSGLLVFAAPAARAQQGPGEMATVPAPGRTGERALPPPHVSARASFLGSTLWM

SEQ ID NO: 3764 - protein, 50 aa, Homo sapiens
LGHVSCLIACWSCKQALSSTVPVPCPNLAPSKYRRPSFPPFSILLSVLSG

SEQ ID NO: 3765 - protein, 100 aa, Homo sapiens
MLTEQHALLAPACTSASRAASELREDPAGAPSSAVWGAEVWRSWGAAMQIPTYPAGPEARGSQAGWEQGLAWEVWGTDKDDGPLRGKTRIRDRSGGPGHG

SEQ ID NO: 3766 - protein, 59 aa, Homo sapiens
MPLHTLFSPPATFSPLLLPLQTPMQPSRPHSPLESLPDPLGNNHHQYLFTEPTLCQALF

SEQ ID NO: 3767 - protein, 89 aa, Homo sapiens
VVVVGLGHPFLVLSLVMGLLLWPLDQLGTGGLQASVSLSVCVSSLHMASLLPPPGRPPGLHHLPYPEALWAISHPPSYSLTPSIHLSHL

SEQ ID NO: 3768 - protein, 10 aa, Homo sapiens
MWFCCLWALL

SEQ ID NO: 3769 - protein, 68 aa, Homo sapiens
MWSAAPLGHLSPASTPPGTAASSPTTQHPGKWSRSWWPLGSRPLASVPSTTWAPTPSASPSSSCSALS

SEQ ID NO: 3770 - protein, 230 aa, Homo sapiens [sequence omitted]

SEQ ID NO: 3771 - protein, 40 aa, Homo sapiens
VGPLGRLLWCWAGVPGAAAVPTSVCWGRAPWRENMEPLLA

SEQ ID NO: 3772 - protein, 16 aa, Homo sapiens
KLVFFGGGFSIVLSMC

SEQ ID NO: 3773 - protein, 11 aa, Homo sapiens
MVAVGWTWLMG

SEQ ID NO: 3774 - protein, 29 aa, Homo sapiens
MNLASRPCFSLFFIHIHSQHLRRCCLIYF

SEQ ID NO: 3775 - protein, 36 aa, Homo sapiens
LVAKGRRRGLSFRGSLPFLCCRSVTLALSPCLDHFL

SEQ ID NO: 3776 - protein, 60 aa, Homo sapiens
LKKLCPSAALILCLALLAWCRACCLLTLTMSCPGPDPPEGPGTQRVWQGALRILQLPGAP

SEQ ID NO: 3777 - protein, 51 aa, Homo sapiens
RSRHHGFLQSSAGGASTLGLPAARGQGLQCAPLHFPAHSWGQSGAGRSGRG

SEQ ID NO: 3778 - protein, 9 aa, Homo sapiens
LLVVFPALL

SEQ ID NO: 3779 - protein, 32 aa, Homo sapiens
RGSRRACVSRTNSGSAVWLLCCCSWTGWADRC

SEQ ID NO: 3780 - protein, 43 aa, Homo sapiens
ITISSNSSSKHNSISCFLLLSFLILSKFSDSRKRNHSPLPPTT

SEQ ID NO: 3781 - protein, 54 aa, Homo sapiens
LTSVYLRVRPILPAGLCLGVTLPELAPTTVATVMLMCDCCQEPAHMTVWRKFFP

SEQ ID NO: 3782 - protein, 9 aa, Homo sapiens
LLMIFFLEL

SEQ ID NO: 3783 - protein, 7 aa, Homo sapiens
ISLLTLL

SEQ ID NO: 3784 - protein, 7 aa, Homo sapiens
LGCFWLL

SEQ ID NO: 3785 - protein, 9 aa, Homo sapiens
LGYKWLLVI

SEQ ID NO: 3786 - protein, 23 aa, Homo sapiens
IWMCPVLSCVFSALSMVSFSENE

SEQ ID NO: 3787 - protein, 47 aa, Homo sapiens
KTWTIEWSRNSPLSLTITVAFLWSSSSPRIPKTAAEFIKIKFVNVTT

SEQ ID NO: 3788 - protein, 43 aa, Homo sapiens
KPLFLSPLPTLPPLTLLLTLLEPCLPGGPISSGRPCLWATWSV

SEQ ID NO: 3789 - protein, 44 aa, Homo sapiens
RMRRRRSAVGSVSARGCGGAGGSSLSGFSLGGGGGGSVDASSAS

SEQ ID NO: 3790 - protein, 22 aa, Homo sapiens
TRGEVLSAVALRLLALISRLPL

SEQ ID NO: 3791 - protein, 28 aa, Homo sapiens
LSLHWCASGQAALLGPGPCLPTPPPSWA

SEQ ID NO: 3792 - protein, 42 aa, Homo sapiens
MNTSHSCISLPPSCIFSLCPLISVSPWEHMPPVSGPPFFFFF

SEQ ID NO: 3793 - protein, 15 aa, Homo sapiens
LRRGFTMLLWLVSNS

SEQ ID NO: 3794 - protein, 11 aa, Homo sapiens
LTLSLCCLLLS

SEQ ID NO: 3795 - protein, 184 aa, Homo sapiens
VSPRKVWAAFLTLDACGQPSSPWMPVGSLPHPGCLWAAFLTLDACGQPSSPWMPVGCLPHPGCLWAAFLTLDACGQPSSPWMPVTWFPWGLPKLRDPKPPSNLMTRLVSEHTCVVPEPLTNPLCNPAHAFPILKGPAHRPAHVFPLPLLCPYLVGSCPFWALVWHFTHKCVLWVVSGPPPAVRG

SEQ ID NO: 3796 - protein, 101 aa, Homo sapiens
MAPPPSSPCSPSMAAARFSSVLWTTVTVLPWPTMAATSPTPAPATFPGQCPRRSTHTRSRPHPPSPSPFPAWRSETGLTPPSSPATRISTGCMGSRPPNTT

SEQ ID NO: 3797 - protein, 39 aa, Homo sapiens
MNGGWKMWSALIRICVRLLATQQPRRASLQASARVPSAR

SEQ ID NO: 3798 - protein, 94 aa, Homo sapiens
LGKGLLGLLVNFCGHHLLLLTSLGGCYQFCPGPFSFISWFPAPSVLTSVCHMRREALPVWEGGYCGWNSGGLQLIRQGPPTSWRASALLIKMSM

SEQ ID NO: 3799 - protein, 36 aa, Homo sapiens
KPSLHCSSSASLLAAAASAARLLRRRGLRQLYRQSP

SEQ ID NO: 3800 - protein, 30 aa, Homo sapiens
TQLREGFVLSSVLWCRASSSPAQPRRFGHI

SEQ ID NO: 3801 - protein, 69 aa, Homo sapiens
REEMEITSPDLAFLSLFLFSPLPSDDWRVKGNPERGGEQRFEKMQECVWRRVKLPFKLWPPGTRCSAAG

SEQ ID NO: 3802 - protein, 29 aa, Homo sapiens
VVVSLTLTAVILVLTRRCRTASHPVSASE

SEQ ID NO: 3803 - protein, 28 aa, Homo sapiens
KPPPMSSTREACLWALAWTLAGREARGF

SEQ ID NO: 3804 - protein, 18 aa, Homo sapiens
MCLGWFFFFFSISLRRFP

SEQ ID NO: 3805 - protein, 83 aa, Homo sapiens
MSSRHLSALWISSATKCQRVWRLILPSLLQSRTRDSRKLLLHRSPTVPASVPVHTGSSRGLWLPTNSICKWSISLHLYCLTII

SEQ ID NO: 3806 - protein, 84 aa, Homo sapiens [sequence omitted]

SEQ ID NO: 3807 - protein, 11 aa, Homo sapiens
LMWIQTFLSVL

SEQ ID NO: 3808 - protein, 41 aa, Homo sapiens
MLALHSILQWPPLLQQMQSFASTCSERWMTIKEMEMCSFPL

SEQ ID NO: 3809 - protein, 19 aa, Homo sapiens
ILMEIKWRTPLTLSSMLLT

SEQ ID NO: 3810 - protein, 31 aa, Homo sapiens
MPSTCLTVQGGMPPNASAKLSVPLWSASLTP

SEQ ID NO: 3811 - protein, 40 aa, Homo sapiens
RSSPPRAPAATASPACMFAACLVPGTRSSSRTAMPWTWAR

SEQ ID NO: 3812 - protein, 64 aa, Homo sapiens
LISHSTTALHGFVCFFTAHSQPFVMPFSKLISECSLSLKLCNTKITRTPKQQPKIYCGMHLINL

SEQ ID NO: 3813 - protein, 35 aa, Homo sapiens
MMPRKRRCCPTWGPILAATWSRQNRSVVSGRRGGR

SEQ ID NO: 3814 - protein, 31 aa, Homo sapiens
LLPSMGAALAEVWTLSPPVTSGTVPRMLSSR

SEQ ID NO: 3815 - protein, 15 aa, Homo sapiens
LSTQVWLPGLLLLRV

SEQ ID NO: 3816 - protein, 10 aa, Homo sapiens
MGPCLLFFLL

SEQ ID NO: 3817 - protein, 94 aa, Homo sapiens
LSLEAQPQVLELQRDPKGSRLCQIQMGPIQCFILLQSLSQTVSPRSPSSGFCVPHGLFPASLLVPLLRIHLSIQCFLGLCSEAGHHWALWINAR

SEQ ID NO: 3818 - protein, 15 aa, Homo sapiens
LGLLMIVVLRLAEDL

SEQ ID NO: 3819 - protein, 19 aa, Homo sapiens
LPDTINQALVTWLCLCPAV

SEQ ID NO: 3820 - protein, 130 aa, Homo sapiens
LLLMIAMTLRLMNSLAKRILDVEDRKSLWGQADLDSNTSQFCLLCLSLSLLICEEEVARMKMPALWFVVRTDTANVEGPAAHRPVALRADHSCLDGRELFLCVASGTLGRKATVRLLRRTLHKGVSSQGR

SEQ ID NO: 3821 - protein, 37 aa, Homo sapiens
LRENLKILLGGLLALRYRWGMSSSFPAIKAMTRESEY

SEQ ID NO: 3822 - protein, 68 aa, Homo sapiens
MSHMVPLALLLPLFPTSRRAALPFLPLFFGLMFPATTDLPPPHPSADLAVHCRHGGLISDRKLRLSER

SEQ ID NO: 3823 - protein, 12 aa, Homo sapiens
LGPVLRLILCFS

SEQ ID NO: 3824 - protein, 38 aa, Homo sapiens
RRTRRASRRRTRWAPCWVAAASARSTRVAASPTGSRWL

SEQ ID NO: 3825 - protein, 70 aa, Homo sapiens
MASWACTAALAPCSTVPSPRRPSGLECSSSSATTCGMPRDGWTARVGCCAAWALAWPRPWWSCAPWRPSR

SEQ ID NO: 3826 - protein, 17 aa, Homo sapiens
ISSSITIRLILILFHGH

SEQ ID NO: 3827 - protein, 47 aa, Homo sapiens
MLAAPSQALGPPSCLALADGHLCWFHQPELCQRPRSPSPRRTLEAIK

SEQ ID NO: 3828 - protein, 25 aa, Homo sapiens
TATATAAGTAAVAGAAAWTRLALAP

SEQ ID NO: 3829 - protein, 8 aa, Homo sapiens
LVLLMWCM

SEQ ID NO: 3830 - protein, 14 aa, Homo sapiens
KPRTKWMFMVMLSS

SEQ ID NO: 3831 - protein, 15 aa, Homo sapiens
VASGMCCWLLQVLLE

SEQ ID NO: 3832 - protein, 19 aa, Homo sapiens
IMVYLWLAMVILMGKNTGL

SEQ ID NO: 3833 - protein, 42 aa, Homo sapiens
MAKAGSIFIIILTSTFQKPHSKTAAPTSAGGFLGVKMCLQRL

SEQ ID NO: 3834 - protein, 47 aa, Homo sapiens
LKPTVLGFLACGISLVGLHTKPCRSAAFPDSPVLSECKGLPCRRCVL

SEQ ID NO: 3835 - protein, 24 aa, Homo sapiens
MLMTKELILKSAWLFLISSITMSV

SEQ ID NO: 3836 - protein, 19 aa, Homo sapiens
LGILFLLWMQNMPTTILEK

SEQ ID NO: 3837 - protein, 25 aa, Homo sapiens
RRSMKTKNMLVLLFSQNSLQELRRH

SEQ ID NO: 3838 - protein, 12 aa, Homo sapiens
LCVFFFSFFPSM

SEQ ID NO: 3839 - protein, 19 aa, Homo sapiens
IAATLSSLASFTFSFSLRC

SEQ ID NO: 3840 - protein, 32 aa, Homo sapiens
VVLVLFLLAEWRLVFSNPVWWSPLLQSTLQRK

SEQ ID NO: 3841 - protein, 64 aa, Homo sapiens
LWSTLAPLLATSSGPAPTLTGHLWRLCLSQGPWQRVGHCTLPHPSMPALLHYGHSPLGRSSASL

SEQ ID NO: 3842 - protein, 25 aa, Homo sapiens
LDMMILMSPTVLSTLSHVLLQLPAT

SEQ ID NO: 3843 - protein, 15 aa, Homo sapiens
ILLVMLLHFTELMIT

SEQ ID NO: 3844 - protein, 23 aa, Homo sapiens
LLTTTLTLLCATCCSDRVCWASR

SEQ ID NO: 3845 - protein, 44 aa, Homo sapiens
MPVAVPTQMWLHFLMATGWSATECPFHGCPEPRPLLQCLGGSYP

SEQ ID NO: 3846 - protein, 14 aa, Homo sapiens
LELGLLLATFLSVS

SEQ ID NO: 3847 - protein, 22 aa, Homo sapiens
IEHVLLNFLGSSLLIIQLTLLA

SEQ ID NO: 3848 - protein, 10 aa, Homo sapiens
IWLNYLSLIC

SEQ ID NO: 3849 - protein, 17 aa, Homo sapiens
LSTCWLSLVAALWDCVK

SEQ ID NO: 3850 - protein, 11 aa, Homo sapiens
IVLLIQFCTVL

SEQ ID NO: 3851 - protein, 141 aa, Homo sapiens
VKEKPRILLLFWIIFYRRDHRNQSLLPRPALLGFGRGTHQPLVFYFFKKPSPEQPKIPLRWGPTALWWPFGENCSPARQLGPECNPSSTPAWRPGPQPWPGGQASPCGALKEGGHEPTPHPSANRGMAPSAFPVPVSNPTQ

SEQ ID NO: 3852 - protein, 55 aa, Homo sapiens
LWPVKGAHMCQSTLMLLWRTLPKVRAARYPTSLNLILSTAASSLFLPCCERSNYS

SEQ ID NO: 3853 - protein, 35 aa, Homo sapiens
LFLSCFLGVAPSCLCCVWKWRTRQIQTPCLNYTDL

SEQ ID NO: 3854 - protein, 21 aa, Homo sapiens
LQWPFMWLAVSLVVTSTQLCL

SEQ ID NO: 3855 - protein, 27 aa, Homo sapiens
LDLLRYAVFILQVVIQSCLLLNHFQAL

SEQ ID NO: 3856 - protein, 27 aa, Homo sapiens
MGPRLALISVGSCVASTWTKMGRQSCC

SEQ ID NO: 3857 - protein, 22 aa, Homo sapiens
LKRCMTICISLLTESSLSCTRI

SEQ ID NO: 3858 - protein, 33 aa, Homo sapiens
LRSTRSAAVHFFRALTQGTLVLVGDGSSFPISA

SEQ ID NO: 3859 - protein, 58 aa, Homo sapiens
LSVAMAMFLAGCGGPLLNDLLPCCSEDTAARKGLAHCGASQGTLVAPASDLVLSLVWG

SEQ ID NO: 3860 - protein, 38 aa, Homo sapiens
LRFKSLISSLFLLQDPEALSLSPWSSAGPWPCWGAPWA

SEQ ID NO: 3861 - protein, 10 aa, Homo sapiens
IYKILVCLAT

SEQ ID NO: 3862 - protein, 8 aa, Homo sapiens
ILSWSFLM

SEQ ID NO: 3863 - protein, 13 aa, Homo sapiens
ILSWSFLINLIHW

SEQ ID NO: 3864 - protein, 23 aa, Homo sapiens
IWISKETTKLSSRLQALLAMWAC

SEQ ID NO: 3865 - protein, 22 aa, Homo sapiens
IRLSLAFILILDGLLFWVPSGC

SEQ ID NO: 3866 - protein, 32 aa, Homo sapiens
IKTVLSTMTGTASRLAGSSALGFCAPWASSSS

SEQ ID NO: 3867 - protein, 39 aa, Homo sapiens
LSFSGRMEFRRWWNLTQFKVPSGPRPLSMGLISILAVAL

SEQ ID NO: 3868 - protein, 37 aa, Homo sapiens
LVKVIASLFCLKPSVAAHHTRIKWKLLTIGSSLCPPL

SEQ ID NO: 3869 - protein, 49 aa, Homo sapiens
LFVIKRGQRSLTHRGTWGGTVLLAQACQRLVTVGPPPFGLTPRPPHEWY

SEQ ID NO: 3870 - protein, 60 aa, Homo sapiens
MRFKASAESGLGSLGERTPSALVLTCLPAPSASCQQRPRLRNCHSSSGCCTSFEVTGDPP

SEQ ID NO: 3871 - protein, 81 aa, Homo sapiens
LYKVLVCVLPLCLLSSFLSLWLASLEALGRCPCCASVCFMFSGEVIMPFFLSSYFRYPIECFLLPGRVRKLCVSGDHGYHS

SEQ ID NO: 3872 - protein, 38 aa, Homo sapiens
LGTGVFLFAVLPSAGSSVLFPLEKYLCAPEPNFSQMHI

SEQ ID NO: 3873 - protein, 81 aa, Homo sapiens
LVLGSQPGVAALLAAGFTPTSSWLKAVLCFEMQPMNTQSDYPDLGRPAVLARVVWPAMGDPGGVTCPFHVLGAFSPTKHLQ

SEQ ID NO: 3874 - protein, 73 aa, Homo sapiens [sequence omitted]

SEQ ID NO: 3875 - protein, 23 aa, Homo sapiens
LARSVCLLVSSLMPFSSPLPNPS

SEQ ID NO: 3876 - protein, 96 aa, Homo sapiens
VSLPAPCHALARTAAVTLVTTASAVIHAHVPSVYMSFGCQDSSWGEGWEWRVAGRSKALWRGLGPGPQQPGWLYVASDTLIPCPELRFWVGLQPHD

SEQ ID NO: 3877 - protein, 175 aa, Homo sapiens
LAAVNARFGNRKVEREVLGSASISVALFSPSWYSPPNLGFLHARVASCSTSLSLILVSTSSPGKFPFSRLALPTRASDFHPSFSLLASDYPPPIPPRPAAQLPPPFTRTGTIIPTPLRPVWDSTCLLPNPTLISAWSLPLWPNLSSRLIGDGHSHSLVPNTSSWMDSRHPCPLFN

SEQ ID NO: 3878 - protein, 44 aa, Homo sapiens
MLFYFGTCSGSRIKNLRWGKKALLSLTLIFCRYFVTQEDLIYSQ

SEQ ID NO: 3879 - protein, 72 aa, Homo sapiens
LLLETAAAAAAAAARGLPAAGAEVLAARAPRPLPTARRDAHSPSTRKEVPSPVTGSCRVQIYTELHNQPKTT

SEQ ID NO: 3880 - protein, 96 aa, Homo sapiens
VVLSLSLSLCLAPGSAGSSRRLSRLRGPAPRPPRYVLIPSSGFHGAPQDYDAAQVAAAGGGGLRGGDALLGKPDPETGGVPLEARKGYCKTRSPRN

SEQ ID NO: 3881 - protein, 118 aa, Homo sapiens
LVILRSLCISWTALLELSSKSTVGWVGGSADFSLDFHIWDELAVISSRKGVAVLHWLFSSHSSSRRALRDFISVLLMKSTFIQGLLWKTSPKVAEQKTFESQQKSSTLHGSLDVKSSI

SEQ ID NO: 3882 - protein, 10 aa, Homo sapiens
LLPFFFLFSL

SEQ ID NO: 3883 - protein, 46 aa, Homo sapiens
RLRVMESRTLLLLFSGAVALIQTWADYNYNQGRNDLIFTLQLWKRQ

SEQ ID NO: 3884 - protein, 53 aa, Homo sapiens
LRPISAHGMPGWTTSGSGAFPGSCGGAIASQPTLSLSVTQRCPLGRTLMGGTG

SEQ ID NO: 3885 - protein, 92 aa, Homo sapiens
VCISIVYILYTLLHRHTNAPIYTGQEHNHVIISTKELRNPARKDIGGGLALKLLFKTRKRRRKRKKRKMLGNIYLTCSTARTLASCCYSCKY

SEQ ID NO: 3886 - protein, 40 aa, Homo sapiens
VAGLGMELSALCVGGLGLCLHPAQGCPSLGSPAWLLLGPE

SEQ ID NO: 3887 - protein, 8 aa, Homo sapiens
LGLMVCLF

SEQ ID NO: 3888 - protein, 45 aa, Homo sapiens
MVPLFHLPPLMNLWITQLCTGLPAAAVSVYLGSCPWLSGWDGTWT

SEQ ID NO: 3889 - protein, 42 aa, Homo sapiens
LLFLVWRRSQWPNCRMKEQCGRSVLWMTTSAWPLQASPPMQG

SEQ ID NO: 3890 - protein, 40 aa, Homo sapiens
MRVTASRPPSTIFSPSCLSTSLSSSRKLPTLTSCSSSFCS

SEQ ID NO: 3891 - protein, 72 aa, Homo sapiens [sequence omitted]

SEQ ID NO: 3892 - protein, 74 aa, Homo sapiens
MTIFHIFKTILVLLDLSRSPHHITQPLCPMGGQTVFQCRRKGCKVRAVCEEGTNESYCEKVCMVKKWITKNKAS

SEQ ID NO: 3893 - protein, 23 aa, Homo sapiens
MPACCSVCCFLVSHLLTSWYNQL

SEQ ID NO: 3894 - protein, 36 aa, Homo sapiens
MVSSWRSLSSRFQTALFFVVSSNGRKRGGCWRKGGE

SEQ ID NO: 3895 - protein, 75 aa, Homo sapiens
MPSQFLLPLGSSFPADSRSLSTQIKRDLLSGRGAGGSTQHDHRGSAGPSIVAAAAAPAAHPASHRLRPRALLHPV

SEQ ID NO: 3896 - protein, 17 aa, Homo sapiens
MKLVFFGGGFSIVLSMC

SEQ ID NO: 3897 - protein, 52 aa, Homo sapiens
LESPAAVGLLLLLWLSLPVRLPSFVVSQRCAGLLLAALRIQGVGCQVQDLQL

SEQ ID NO: 3898 - protein, 37 aa, Homo sapiens
LPPSPAALLLLLRLRLLVPRLREPSSPPPPPPGCGGC

SEQ ID NO: 3899 - protein, 13 aa, Homo sapiens
LGSLSIFFFLTAF

SEQ ID NO: 3900 - protein, 13 aa, Homo sapiens
VGRLPLLFPLSFL

SEQ ID NO: 3901 - protein, 37 aa, Homo sapiens
VVSARGMARKRPGMPATVVSQVSFVHSISLCTTTLQG

SEQ ID NO: 3902 - protein, 45 aa, Homo sapiens
MMLPTMLFCLSNLKGPSALNSSPDHLILQGPRSRSWSHQNFWAKG

SEQ ID NO: 3903 - protein, 62 aa, Homo sapiens
TAWDEGRRVCVLAFILLSWEPTAGGSFSGSLGGRWMGSRGPRGTGPGKRRRRRRRSRSPGEA

SEQ ID NO: 3904 - protein, 8 aa, Homo sapiens
ILTAVIVF

SEQ ID NO: 3905 - protein, 23 aa, Homo sapiens
IGLVARLLSFLVYDFRLCGIRLR

SEQ ID NO: 3906 - protein, 45 aa, Homo sapiens
LAGFPVAVRCAAGLAALQSFVMVTSDSPAVVNVKPRRSDALSEHV

SEQ ID NO: 3907 - protein, 38 aa, Homo sapiens
LSLLQACSVWWLGSANPRAHRVGAAGKLLPLPAGRRHA

SEQ ID NO: 3908 - protein, 47 aa, Homo sapiens
MSFTQKINSTWFLNFCTKISRNSWMPLLSLAFLFPSSRAICSSCSRA

SEQ ID NO: 3909 - protein, 75 aa, Homo sapiens
KTWMKDDDFLNRKHKKVKKRSNKMILMNMMMTTLQPQLHFSHSLFNLSKVIFLQWHSQDCHQYQEHQECLQAYLH

SEQ ID NO: 3910 - protein, 44 aa, Homo sapiens
MLSRGWLLLVQVLPPTPRISARLCHGGQRPPRVKKKNEPFQSGQ

SEQ ID NO: 3911 - protein, 37 aa, Homo sapiens
VAAAAAAAAAAAAAEAPVAAAASPATTTKKNPHQILT

SEQ ID NO: 3912 - protein, 29 aa, Homo sapiens
LMFLSAGPIVPLLRNVSPVQGQRLKRLLY

SEQ ID NO: 3913 - protein, 24 aa, Homo sapiens
MRCCACVAGGLAVRLTASGLRLGG

SEQ ID NO: 3914 - protein, 61 aa, Homo sapiens
LSLFLFLEHCSCCPLPSHCLASLIGRPLVAMCPLSPASVVSLPESATIDNDLLNLPLYSVP

SEQ ID NO: 3915 - protein, 45 aa, Homo sapiens
LRRAIWGLLCLMVAEENQEASLRKLAVRRKFWRLGRATQRYSVAW

SEQ ID NO: 3916 - protein, 53 aa, Homo sapiens
VIFLLLLLLLLPPPLPLGSFAPTPSRRPAPSPTQDVRGFSKAAGKLQSSAPAS

SEQ ID NO: 3917 - protein, 26 aa, Homo sapiens
LLLQLLQLPSGPTAAAAAFFLHDENI

SEQ ID NO: 3918 - protein, 48 aa, Homo sapiens
LPVWLLLIEFLWCSLACSSVFCISCSVMFKLRNALCGSSESHLWFSRH

SEQ ID NO: 3919 - protein, 14 aa, Homo sapiens
LVQFSMFLCVLHLL

SEQ ID NO: 3920 - protein, 30 aa, Homo sapiens
LLIFLFYSVMFKLRNALCGSSESHLWFSRH

SEQ ID NO: 3921 - protein, 14 aa, Homo sapiens
LLLLYTFLILGFDR

SEQ ID NO: 3922 - protein, 54 aa, Homo sapiens
LTSLGGGAFLCLLNFMRILRLNYRPLFPGKSIHQCILKKKKKKKKPAKTVSKCS

SEQ ID NO: 3923 - protein, 178 aa, Homo sapiens [sequence omitted]

SEQ ID NO: 3924 - protein, 41 aa, Homo sapiens
VTSTTRPSTATSSASLAFATTCSLSTAAPPTRTSTSSYAEA

SEQ ID NO: 3925 - protein, 76 aa, Homo sapiens
LAKKLLPVASMTYPRLFDAIRCHLLLLLDPLASLPFHSLTTAPALPTQLRFLLLGGGKKLLIIGQRDLPLERPSAF

SEQ ID NO: 3926 - protein, 76 aa, Homo sapiens
LRQLPALIHSFIHSLTSCLLNSSGLALGSSESHTLPPATCEICLETVGYSGKGRCPENPSGAGQKHRPCWAEAGMG

SEQ ID NO: 3927 - protein, 23 aa, Homo sapiens
MPDAGHLLLYLGNSCWASLWPPW

SEQ ID NO: 3928 - protein, 38 aa, Homo sapiens
MGMGLNLGGLPCPRDCAHFLTGAILLPTVTAAPTKPAP

SEQ ID NO: 3929 - protein, 108 aa, Homo sapiens [sequence omitted]

SEQ ID NO: 3930 - protein, 66 aa, Homo sapiens
VRAPAGSGRRGDPRRAGGLAAVATCLVASAAVGSWGDGGAGAGLAVQESQPWPPPSRIWSIWHLCT

SEQ ID NO: 3931 - protein, 62 aa, Homo sapiens [sequence omitted]

SEQ ID NO: 3932 - protein, 109 aa, Homo sapiens [sequence omitted]

SEQ ID NO: 3933 - protein, 111 aa, Homo sapiens
LQSAFSPAGPGLALRPAPCAAASSFCRRRPVLPGFLLCGGLTLCLWELEVDKGECRGVATGFFPVAAASRDAGSVGLLLATDLGHLPAASGQAMRPPSPATQRGRRVARRA

SEQ ID NO: 3934 - protein, 31 aa, Homo sapiens
MPSETGILLILLGHCGEVLAPMWTDLGTVGN

SEQ ID NO: 3935 - protein, 55 aa, Homo sapiens
MKKSSLLLLLLLLLLRVPASSCQGGQPASSRRGARELKESQFPQNCCSEKRSLLL

SEQ ID NO: 3936 - protein, 34 aa, Homo sapiens
MKKSSLLLLLLLLLLRVPASSCQGGQPASSRRLQ

SEQ ID NO: 3937 - protein, 39 aa, Homo sapiens
MKKSSLLLLLLLLLLRVPASSCQGGQPASSRRDKLEVSL

SEQ ID NO: 3938 - protein, 53 aa, Homo sapiens
LGLQVLLVLSSSSLAGHRDFWTGNCTILFSQQGGSRDCPPRKSGGLGIWTVPW

SEQ ID NO: 3939 - protein, 81 aa, Homo sapiens
LGLQVLLVLSSSSLAGHRDFWTGNCTILFSQQGGSRDCPPRKSGGLGIWWVCSLAVAWGSVALVMTRAPGRDVLVAGGPCA

SEQ ID NO: 3940 - protein, 59 aa, Homo sapiens
MLCSLLFSLLSLGLEEHGPPREWASASLDSCLLPRARPGGPEARVPRASKIFGFKPISC

SEQ ID NO: 3941 - protein, 12 aa, Homo sapiens
LTVLSQMVFLFT

SEQ ID NO: 3942 - protein, 36 aa, Homo sapiens
LTQTFTLAWAGCSGAASAHCNLHLPDSRILLPQLSE

SEQ ID NO: 3943 - protein, 10 aa, Homo sapiens
VISSVFCFLF

SEQ ID NO: 3944 - protein, 27 aa, Homo sapiens
MASLAAMLELSLFGARPAPGPPSVAAS

SEQ ID NO: 3945 - protein, 29 aa, Homo sapiens
LVLQMLLGFIGAGPSRAGPLTLPAWLHSP

SEQ ID NO: 3946 - protein, 32 aa, Homo sapiens
LHLSIWVAMAMACPPATVCPRPPQRQNEPIGS

SEQ ID NO: 3947 - protein, 77 aa, Homo sapiens
MSSVSSSLSGCCFSTALLFPPPFSPGRLTLRQRREPHPLSLRNHHGGWGKFAGSGGSGHPIHRHPLPEWGQSAPEEF

SEQ ID NO: 3948 - protein, 61 aa, Homo sapiens
LCSPRARVSLLRRRGLSATTSFLLSAPSPSLHPAIPTPPYLFPWSRRQSLLVCLRDSGLPP

SEQ ID NO: 3949 - protein, 8 aa, Homo sapiens
MAGLVWAL

SEQ ID NO: 3950 - protein, 33 aa, Homo sapiens
LSSKLIRIVVLLCYISRPLSHCLHNDFGCIFIL

SEQ ID NO: 3951 - protein, 78 aa, Homo sapiens
LACKLPLSPGWDCSVLALLFCVTSWGVRFCLQETNFGRRMEATASLCAEKEGACFKGSSKGGLFYSPGPVCLRRGDKG

SEQ ID NO: 3952 - protein, 67 aa, Homo sapiens
VLGRSHCAAHLVNLLSVLMASPRWGTAVCRIQGPLSACNSFPWMPQKQSRPPFLSYPFALLFTPAPL

SEQ ID NO: 3953 - protein, 16 aa, Homo sapiens
LLCFLLHLALFTSICI

SEQ ID NO: 3954 - protein, 17 aa, Homo sapiens
MASLWVFFFYTNLRKTK

SEQ ID NO: 3955 - protein, 18 aa, Homo sapiens
VIFSALFMCGFLSPLPWS

SEQ ID NO: 3956 - protein, 49 aa, Homo sapiens
RWDASLLLIRFTIYCSGCFLIPVLLGPGSFAPCPAPRRGGWCGNGWARW

SEQ ID NO: 3957 - protein, 51 aa, Homo sapiens
LTSASWQSTWSPSHVSISLCLALPLSPAVEASSIELSQCRNSPSRSSMPRT

SEQ ID NO: 3958 - protein, 58 aa, Homo sapiens
TRSPCLALLLEIVSLFSFAVPQSPTLHPLFSPILREPIQIPLPFFPCRPSYGRERCGQ

SEQ ID NO: 3959 - protein, 26 aa, Homo sapiens
RKMLGNIYLTCSTARTLASCCYSCKY

SEQ ID NO: 3960 - protein, 50 aa, Homo sapiens
LLLLLLLLPPPLPLGSFAPTPSRRPAPSPTQDVRGFSKAAGKLQSSAPAS

SEQ ID NO: 3961 - protein, 35 aa, Homo sapiens
TGLLVAAHSLQPLHSTVQCWPCTLGLLPLPPWSCP

SEQ ID NO: 3962 - protein, 51 aa, Homo sapiens
ICFHKSVLFFSLFCLCISSNCLFKMPRIWTPSTSNRHWEGEGRKAECKMKW

SEQ ID NO: 3963 - protein, 18 aa, Homo sapiens
LPNTAATPSVPLLLLVTA

SEQ ID NO: 3964 - protein, 14 aa, Homo sapiens
LISLFCFLSLPPLS

SEQ ID NO: 3965 - protein, 12 aa, Homo sapiens
ILFSFLKMYIFF

SEQ ID NO: 3966 - protein, 15 aa, Homo sapiens
LHLLLIKLVAPFTFL

SEQ ID NO: 3967 - protein, 62 aa, Homo sapiens
IFFCLLRSSLALFFSFPISDLFQGESGFGGRGRKVGLQDQPPPTTIKTTRIFFCKFLTALNS

SEQ ID NO: 3968 - protein, 44 aa, Homo sapiens
MESRTLLLLFSGAVALIQTWAEMISFLHYNSGKGNRLRCKCAPK

SEQ ID NO: 3969 - protein, 49 aa, Homo sapiens
KGLVKGLQGDGLGGRRFLFLLPFCLCSPNVPVSPLPHLGPLFGPCGQSC

SEQ ID NO: 3970 - protein, 65 aa, Homo sapiens
IASFLLTTASTVRSPAEPGPGGESCLHGRAPRPHRRSRHHLSPSLVPAMGFVSSSALVTDLDTEY

SEQ ID NO: 3971 - protein, 66 aa, Homo sapiens
RYPTLWDRCRKRWLRPIFTQLLAAGLAYHTLLPIPSEPLFAAPGEHLHQCFVKESYCPPRVLAKEQ

SEQ ID NO: 3972 - protein, 28 aa, Homo sapiens
RVFFSLFFQIFCMFKHFHSRKLGGKSVS

SEQ ID NO: 3973 - protein, 86 aa, Homo sapiens
RRLKRCPSRWLCLSAAWSFVQVFSEPDGFTVIFSGLGNNAGGTMHWNDTRPAHFRILKVVLREAVAECLMDSYSLDVHGGRRTAAG

SEQ ID NO: 3974 - protein, 75 aa, Homo sapiens
ISFQTSALALALLYSQNWFLRLARVGGRVWEEDRFPPASLGSQEKSLQILRFRVKSQSSFFWSAQNCLCLLPHEE

SEQ ID NO: 3975 - protein, 35 aa, Homo sapiens
TLSMGLCWMRVLLTQVYTSISGQQKRRMTQAWCIK

SEQ ID NO: 3976 - protein, 30 aa, Homo sapiens
MSHVCLKKEWALLLLESNLLIVVITFDCSY

SEQ ID NO: 3977 - protein, 27 aa, Homo sapiens
LQFWASKFWLLHIFPFVPPALEVVAAF

SEQ ID NO: 3978 - protein, 40 aa, Homo sapiens
RSCLRCRLKSVKLMSSSLWTTTAVSTWTASLLRSRPSTRI

SEQ ID NO: 3979 - protein, 69 aa, Homo sapiens
LAYILLFLDFFLIKRLLQCLSCDSGMDICPRLSCWGPSMSLQVPSWSPSPALEAWLRASWRRSFGSMLS

SEQ ID NO: 3980 - protein, 34 aa, Homo sapiens
LCLPVSVLNLILSSYLLPVSTSRLPPLPRTNSCS

SEQ ID NO: 3981 - protein, 38 aa, Homo sapiens
INQDSGRQLLRKMLKGKHQGLVLIFESLRVVYFYSVNT

SEQ ID NO: 3982 - protein, 36 aa, Homo sapiens
IKDRLMKLLKKHQCWLLCSRMWGMAYSPSLDIFEIS

SEQ ID NO: 3983 - protein, 47 aa, Homo sapiens
KQRGGRRSKQPLEDQHSRDYGGPSVFSVTGAMLTSVSWTHSDSGAFT

SEQ ID NO: 3984 - protein, 17 aa, Homo sapiens
IVLNILAALAAFALEFL

SEQ ID NO: 3985 - protein, 83 aa, Homo sapiens
IFQDLIMKLSGISWTIITELSSQHCCCIKVQLPVSFPLKHAVVTRRPRSRTAYTALLGPGLWLLHTGELMMTREGPMSWSTQL

SEQ ID NO: 3986 - protein, 27 aa, Homo sapiens
LQLISCFLAILSLSSSIPQLSLSRTGL

SEQ ID NO: 3987 - protein, 38 aa, Homo sapiens
LSFSPFPSLGLSFSLAALGWSLRARGDCQRCPLSVTGP

SEQ ID NO: 3988 - protein, 63 aa, Homo sapiens
TRPSSWSLRTSPMRAFIWTCGTWTLWSLSDRSLGSSRICMGFAGSLKRPGRTKARTTFWGTWF

SEQ ID NO: 3989 - protein, 40 aa, Homo sapiens
TAAAPASLSAALQPPAPPRSSLALRRPHRRPRPHQPWRRW

SEQ ID NO: 3990 - protein, 74 aa, Homo sapiens
VVVFIWGFAYLVVRFCESLLILPDVSCGVKSTRPPPLSLRVRGIRGDPVTKDIEEKNKSLAFFFLIACFSPPPN

SEQ ID NO: 3991 - protein, 17 aa, Homo sapiens
MYSVQCLMLWLIFRKLL

SEQ ID NO: 3992 - protein, 48 aa, Homo sapiens
MIKMALGVMAFDGGAAGVHGQSPVPRNQGALTRLLCWTWPRTASSQGW

SEQ ID NO: 3993 - protein, 55 aa, Homo sapiens
VCVFLCWFFKEMGRRKKNSPPLSSISLPPSVLSTGPPSLFCSVLFCFATSPHSCL

SEQ ID NO: 3994 - protein, 11 aa, Homo sapiens
IFLLQMVLLFV

SEQ ID NO: 3995 - protein, 61 aa, Homo sapiens
LAPLPSRPADAGGPASAVGSCVAGPGAAGGAAAASEALGLGPVPYRLERVHPAAHPQPAHG

SEQ ID NO: 3996 - protein, 43 aa, Homo sapiens
LSRGWLLLVQVLPPTPRISARLCHGGQRPPRVKKKNEPFQSGQ

SEQ ID NO: 3997 - protein, 19 aa, Homo sapiens
LCSLMLGLLGLQRWAPLLA

SEQ ID NO: 3998 - protein, 72 aa, Homo sapiens
MSRGRCFSGAITHSPPSASVVWTLSNGSGRSTANPPGSLGLWPRARQSLRRTYATSLRSMTWSSQPRRSSAW

SEQ ID NO: 3999 - protein, 44 aa, Homo sapiens
MGRRKKNSPPLSSISLPPSVLSTGPPSLFCSVLFCFATSPHSCL

SEQ ID NO: 4000 - protein, 91 aa, Homo sapiens
MSSWWKRGLRPSACSCCTAAWPRATSRAVSTTSPENCRHSSRAMAKPMPLLAPVTSATRLQDDMAERGARGTCVEGGPGFGPPGARPEEPS

SEQ ID NO: 4001 - protein, 33 aa, Homo sapiens
ISDTSLSFSPLLLPPAHIASPLPPPSPAGLLAS

SEQ ID NO: 4002 - protein, 172 aa, Homo sapiens
VPRFAGAAAARRREAGLGRARSSEPRRAPRLSLLTAAAGLRLSALGSAASAPLHSTSAPSDSLPSASTPPAPVRIVSQLLATRPVPGCFSISRPPLLEYFTPCIWGQGLEKGRVERPVEKKEARPAGGGGSADCGEETPRHPFWSSPLPPRPCAHSLAGELLSDQESKSGPG

SEQ ID NO: 4003 - protein, 33 aa, Homo sapiens
LVVLVLFLLAEWRLVFSNPVWWSPLLQSTLQRK

SEQ ID NO: 4004 - protein, 50 aa, Homo sapiens
RRSCRRGVSSSGMGSTKPAMLLAWVWTGAPQRKPRPTSWPSCTRRWTRQR

SEQ ID NO: 4005 - protein, 9 aa, Homo sapiens
VASVLLLWW

SEQ ID NO: 4006 - protein, 23 aa, Homo sapiens
TRARSYVSAAAAAASVAAATSSP

SEQ ID NO: 4007 - protein, 74 aa, Homo sapiens
LNLRRFLRGAAWMLLSPTRCISCCHQESSLASQGLRKYHQSDSTVLCPLRGRRKRMPCRTAHSVPLCSRTPSIM

SEQ ID NO: 4008 - protein, 37 aa, Homo sapiens
MRRWACCSWSRCSCCPAPTDCPSTTASTTPTAPTTRT

SEQ ID NO: 4009 - protein, 50 aa, Homo sapiens
MTSRWRSRICGWRTMGVTAVRSLTGWRMKAVWWSWSCGDGAVCPHISPTC

SEQ ID NO: 4010 - protein, 41 aa, Homo sapiens
MSARPRSPAAQSSTRPSSAIVTCFSVPGLGPVLTSQQTCTE

SEQ ID NO: 4011 - protein, 30 aa, Homo sapiens
TARGPTCLPWLSMSLATPWAWATPQPPTPL

SEQ ID NO: 4012 - protein, 16 aa, Homo sapiens
ILCTWFPLLLMWLKDG

SEQ ID NO: 4013 - protein, 74 aa, Homo sapiens
TMGPSWMWMRMTLRRLMLPPATVWRIWPHWCTSMSPASCTPCASAMALACCTRMLAPACWFLAPVGPLLCTLRR

SEQ ID NO: 4014 - protein, 8 aa, Homo sapiens
LLFILCVI

SEQ ID NO: 4015 - protein, 46 aa, Homo sapiens
RSKPSIMRATMIWRNRSSRRPWRRLLWPSVAQCPSSSWVKWTAAPS

SEQ ID NO: 4016 - protein, 62 aa, Homo sapiens
LCSTPRMHRLWIGPAFFLMTSLSVSGAVIPRNGGPGGVSSGPCLLQLLCGQAGSSTIRKIPS

SEQ ID NO: 4017 - protein, 81 aa, Homo sapiens
VLHPSRHSAVSCLGVAAAMARKALPPTHLGQSWFCSCCRDTELAISALRARTATGSPGSCRCTAGPLPCASALESCCCRVT

SEQ ID NO: 4018 - protein, 29 aa, Homo sapiens
ILIWLLGCYLEIQALKMPASLDLEDDLDK

SEQ ID NO: 4019 - protein, 72 aa, Homo sapiens
MAQSGGAAFWGSALGLQTQGAEMLAAGPPTRARQPALPGELRGAEVPGEAAPGARALPDLGNRQSGAPGSKS

SEQ ID NO: 4020 - protein, 122 aa, Homo sapiens
MCYLLLLLIQTAELLIHPQGLQAVSNGESALKGTRPTFSSPFILVTEGRKEWEGVFLSSGWKGNTLSNYYISLVFYYSRILQPYFYCLWGKLEMVTLIRSVWRGINGGDKIQLVLENVKVLK

SEQ ID NO: 4021 - protein, 47 aa, Homo sapiens
MAPNCPCLWHPLSLVPSIPTTACQSKPVPASRMVPAPAPRPPPPQVP

SEQ ID NO: 4022 - protein, 23 aa, Homo sapiens
MSRRFIFSLCFFLFQFILNAYFS

SEQ ID NO: 4023 - protein, 47 aa, Homo sapiens
MLSRGWLLLVQVLPPTPRISARLCHGGQRPPRWLTFSPTICFLLLKG

SEQ ID NO: 4024 - protein, 50 aa, Homo sapiens
MGWWLRQMMMKIGDDWPLVALGLPSPSGHGGRRELNLGPGYLPPVFPTSS

SEQ ID NO: 4025 - protein, 54 aa, Homo sapiens
MDPQRRFLVASLVAGVCIETLRGKAPRLGLGAWRRRLPPRSSSPGPEAPRLQSC

SEQ ID NO: 4026 - protein, 20 aa, Homo sapiens
VLRSAVLGSCVDSGLETLPA

SEQ ID NO: 4027 - protein, 41 aa, Homo sapiens
MPAPSALKGTSLILLLTGLRPQLVATTTYQAISRVGLRTQS

SEQ ID NO: 4028 - protein, 79 aa, Homo sapiens
MKGLGQAGPSCLRSLLVAVACSSSLVVQIPRLTKRRNSFYLHPGPIIADPDVCRGENKRSKNRPCCEGPRGSARMKELE

SEQ ID NO: 4029 - protein, 45 aa, Homo sapiens
MKGLGQAGPSCLRSLLVAVACSSSLGKIKEAKTGPAVRDHEAVPG

SEQ ID NO: 4030 - protein, 41 aa, Homo sapiens
LCQLSSIQISFLCLMLLPYPIPGPSSAFWKFPFAQEVVSSS

SEQ ID NO: 4031 - protein, 11 aa, Homo sapiens
LGNNNLVVFLL

SEQ ID NO: 4032 - protein, 108 aa, Homo sapiens
VGGLRLLLGAVHLTVPAIGESPVLVAFDGDEGVVTRLRVPADPGHHRHVQVLNAECSCAASAQTMATEQRLAQPDLLHPSSGEQMDRSAETPSGHLPPLCGEKVVFDG

SEQ ID NO: 4033 - protein, 38 aa, Homo sapiens
LISIKGLGMHYVIVLSLFVVLEKKNKMGSDGCLRKNGS

SEQ ID NO: 4034 - protein, 44 aa, Homo sapiens
VLIQLSSFHELTLIYDCVSDLRCMLPVIAVALVSDSFAIAKYPL

SEQ ID NO: 4035 - protein, 54 aa, Homo sapiens
LSPILTRLFALPSPPTQGLPSSPPCNTAPRTMSVYLETARPIPFWVSSVPFSHR

SEQ ID NO: 4036 - protein, 27 aa, Homo sapiens
MKQSTSFSSIVLTSLPFIQLDRHSHSL

SEQ ID NO: 4037 - protein, 56 aa, Homo sapiens
VILNKSHKIWWVYQGFLLLLLPQFLLLPPCKKDLLPPTMILSPPQPRGTISGGFFK

SEQ ID NO: 4038 - protein, 72 aa, Homo sapiens
LTINLDSGCSNFKFFSSFSLQAFIWSLFESEDPENLDPLLALIPLGSVIWIEQMLRLPLHHILETALLYSKS

SEQ ID NO: 4039 - protein, 10 aa, Homo sapiens
LKMLMSALVF

SEQ ID NO: 4040 - protein, 48 aa, Homo sapiens
MVKNFLNMFYMFLIYLPLKEGWPEELKEPLILQDRPKHVILLYHMRFI

SEQ ID NO: 4041 - protein, 44 aa, Homo sapiens
MYTRTRTRAPVSRAVSLADTQALTSLSLPACRAATPKTQLRVPT

SEQ ID NO: 4042 - protein, 38 aa, Homo sapiens
LAVAMDTLCVAAMGAVLQQSQGISLLRVLCFIMKNNGR

SEQ ID NO: 4043 - protein, 18 aa, Homo sapiens
MTVVSVASLAGLLFLRFS

SEQ ID NO: 4044 - protein, 71 aa, Homo sapiens
LGNLSCSFLFNFFYLSLTRAYSHWICRRSVGDRGCEGLCHPSSRIWGERAPSLLSLPPFRTPRRDSFWDSH

SEQ ID NO: 4045 - protein, 61 aa, Homo sapiens
VPERAGLAAATAAAQAAGASLPRAALPALLPGRAAGMGRPREPERAQEPPPPPPASPLPRA

SEQ ID NO: 4046 - protein, 31 aa, Homo sapiens
MPTSPHTLLISLSLPLSPRHVGHCCQRLPPP

SEQ ID NO: 4047 - protein, 61 aa, Homo sapiens
VDRRAGAAALVAVAEVAAASAAAAAATASGSGFWRRRRRARLRGADPGARSGLLGRRVRCL

SEQ ID NO: 4048 - protein, 76 aa, Homo sapiens
VDRRAGAAALVAVAEVAAASAAAAAATASGSGFWRRRRRARLRGADPGARSGLLGRRVWRQLCHPRLPGPQSQLWG

SEQ ID NO: 4049 - protein, 60 aa, Homo sapiens
LVAVAEVAAASAAAAAATASGSGFWRRRRRARLRGADPGARSGLLGRRVDGVLLHCPGWS

SEQ ID NO: 4050 - protein, 36 aa, Homo sapiens
MNVLLLALPLTHRVPQASPFTSSVSVSPFILLRQWT

SEQ ID NO: 4051 - protein, 23 aa, Homo sapiens
VAAQLQVLARPGLALWMMMALPP

SEQ ID NO: 4052 - protein, 118 aa, Homo sapiens
MGTRAAWFLALPFTPLPSRRCYWWPTRVHWGVMPAAEGSHLCSLEASLGYWKAPCPGDKCLGSYSLLSGPLIQEPVTGGVGTLWYCGLCLELSVGPAEAGRPLKPLPCPAAPSPPLLP

SEQ ID NO: 4053 - protein, 25 aa, Homo sapiens
MALKTALSLCMPLSSSSCHHRLILR

SEQ ID NO: 4054 - protein, 87 aa, Homo sapiens
MATLAPILWAPGFAHQISSPLALHLLLYLQGLPDSHLPIIMDTAPGCAGLSGTIWSSSWNLGLVEWEWGRGLHWADLESTVIPSIWK

SEQ ID NO: 4055 - protein, 28 aa, Homo sapiens
IECYSTLDLSLIFWSLASCIFLEPQLNS

SEQ ID NO: 4056 - protein, 45 aa, Homo sapiens
LFLPSLRLQCLMGLPVGGSVFAVPGRSGEPWEEVLRRPSLGSPQD

SEQ ID NO: 4057 - protein, 40 aa, Homo sapiens
IMWVTVMMSNAFAVMVDSGVGNLEMIHGFNMPSGFQGVST

SEQ ID NO: 4058 - protein, 52 aa, Homo sapiens
IGLLSGGRPTARSFFSALVRFLFGFLPASGATRVARQQPLGDLVLGSCPAWG

SEQ ID NO: 4059 - protein, 11 aa, Homo sapiens
LCCVWVCVFLF

SEQ ID NO: 4060 - protein, 25 aa, Homo sapiens
VAIRLVLKFLMLCLVTHTVPRDSAL

SEQ ID NO: 4061 - protein, 93 aa, Homo sapiens
MDPALRSPTPPGSLSTALPGLAPSSGLGEQGLGVVQPSQQEGLRPSRRKAQREGALIPSDPVFPHPPYPAGLGLRQGWPQFLLNRPGGSPSPA

SEQ ID NO: 4062 - protein, 25 aa, Homo sapiens
LFLNASQALLLGLLLLINPNICTKN

SEQ ID NO: 4063 - protein, 35 aa, Homo sapiens
MFSCTIRLFTRKGKLFLFGISIQDILSLCKDRSRS

SEQ ID NO: 4064 - protein, 128 aa, Homo sapiens
IAALYEMPVPACWISSSLSLLASHHSVSCSNIFLNFNPDHIRVQAQVYFTQESSILSSTLWNFCLLPQQRFCGREYVQAGWPCWLLQFFSQTYMHPMKTAGKPWLLRYPSLLEQQILSTYQMTPQSPS

SEQ ID NO: 4065 - protein, 117 aa, Homo sapiens
IQPRMLQRSLFLLLLKTTGDHFGNLKKLWSLPYMTTKPMILRNSHCGATKSTACWTVLRFTGGESRTGMGMKDMYQAVIWWKNLQIIWKPMSGTIRVSAETKLKNFFWTQAKKEPSW

SEQ ID NO: 4066 - protein, 126 aa, Homo sapiens
LAPGLGFGRVKMCWPDGLMGCYTWVPSKRWTVLGRCVWSSLRMIRSFWFYGKTLALLPSLERNSSVVSVALRLWSLGTGWSAVRSVAMLITRTAMFPGLQPLERERAHPGYAASVSLRSPPRGEVP

SEQ ID NO: 4067 - protein, 16 aa, Homo sapiens
IARLVNLSRLNMLWLL

SEQ ID NO: 4068 - protein, 13 aa, Homo sapiens
LVNLSRLNMLWLL

SEQ ID NO: 4069 - protein, 15 aa, Homo sapiens
MKTSISWWLCMTTPL

SEQ ID NO: 4070 - protein, 14 aa, Homo sapiens
LGTLFITMTNLCVL

SEQ ID NO: 4071 - protein, 39 aa, Homo sapiens
LSPEPPCCRRLLPLLAVSPSVPALCAPPSGPWMVLLQIL

SEQ ID NO: 4072 - protein, 20 aa, Homo sapiens
LSIFSWVEPVTWFLFVLLEK

SEQ ID NO: 4073 - protein, 28 aa, Homo sapiens
MFLSAGPIVPLLRNVSPVQGQRLKRLLY

SEQ ID NO: 4074 - protein, 30 aa, Homo sapiens
VLMFLSAGPIVPLLRNVSPVQGQRLKRLLY

SEQ ID NO: 4075 - protein, 49 aa, Homo sapiens
MCLSFTPPLSAATAAAAAAAAAAARIAAAPSLARRRYLLGQVRSSPEIL

SEQ ID NO: 4076 - protein, 13 aa, Homo sapiens
LRIMCVGVSWTLL

SEQ ID NO: 4077 - protein, 33 aa, Homo sapiens
MPLLRGLLWLQVLCAGPLHTEAVVLLKQKVWCK

SEQ ID NO: 4078 - protein, 64 aa, Homo sapiens
LQLAVWNVAQEALIFLAGTVAAVLACGPGQPLPSRRAGEDWCMLGFVVRPHEARPGNIMGRNGA

SEQ ID NO: 4079 - protein, 113 aa, Homo sapiens
RFSRPQLMPRLSLVVLLLSILDGAPGHHFRLSEYCKKQAQTSPKQSCHTWIGLFLIRKSSWSLLNLAATWNMISLVLNYFITNSAQILTCLMITKELEGCVSWWKRAVKIEFW

SEQ ID NO: 4080 - protein, 39 aa, Homo sapiens
ILLIYFLIMLISNEDSCLKIFFNLMVSIFCKNHVNLFHS

SEQ ID NO: 4081 - protein, 56 aa, Homo sapiens
LKRLGLSLLVHASSASGQQVTVMMSNAFAVMVDSGVGNLEMIHGFNMPSGFQGVST

SEQ ID NO: 4082 - protein, 14 aa, Homo sapiens
MGMFCISCLVLNFL

SEQ ID NO: 4083 - protein, 72 aa, Homo sapiens
LEVLRAYKKARRHPPLCSGAALPAGCRHSGQCLLHLLGTSGAAAPAPGSERRVPEIPASLRPTVVRGESCKC

SEQ ID NO: 4084 - protein, 28 aa, Homo sapiens
MRKLRLEGEKQLPLAAWLLAAGCPWSSW

SEQ ID NO: 4085 - protein, 52 aa, Homo sapiens
RMSTAFCPIHSSLGSMVMCLCILSPLCIASKSLRVCTKSYMKAMGKPGCQWF

SEQ ID NO: 4086 - protein, 100 aa, Homo sapiens
VGSRAQTGAILPEAASRSWGRPGGRLKLFFCLFCSLGLGEDLEVWAPSSPLETAMVSSNHHHLTTLHGGCPLRAASAAALSSPLYLSAPEPQSSFRPRDR

SEQ ID NO: 4087 - protein, 16 aa, Homo sapiens
LILTITTVFLAIVCSD

SEQ ID NO: 4088 - protein, 127 aa, Homo sapiens
IVRAYMKFVMISLHMSRIDILSKKLWKSLGTMVQGCSVGFWKSSLHHIKMVLLMDMLTVWMEKLLSSVIVMIQKHKAVLFKMGRKKMQLIPYYSSIKCNPLKKNYMSLLLLKQHKSAGENTYFLVIN

SEQ ID NO: 4089 - protein, 32 aa, Homo sapiens
IAPPALGFWPRRWRLWLAVTLAFQARPGEATR

SEQ ID NO: 4090 - protein, 61 aa, Homo sapiens
KPFLLPPLPPLLLISAGTEVSSLVFQKSPLHTQPEGAIKTVGQPTSVHSKVLSKGSLLLGE

SEQ ID NO: 4091 - protein, 114 aa, Homo sapiens
MAAPRATMASTVARNATVPTGAGATASTGPASATQGSTAASATSPARRGPLGRAARRSASVCSPTRSPVTRGMAAAPARLASGASAVRQSVSWATLGRGAGRHAPAQWAWPVTP

SEQ ID NO: 4092 - protein, 52 aa, Homo sapiens
MRGPWSPQPGTLVLFSALAPPKQSPSMRWAQPSPTSCWPSWTSTTSASGCRS

SEQ ID NO: 4093 - protein, 38 aa, Homo sapiens
VFENRASATCMMWIGEMVCPPSHGMSLLCSGIFPSLGF

SEQ ID NO: 4094 - protein, 46 aa, Homo sapiens
MVPVNVLLPSCGCSTACSTTASQPSSGPCSGIDSISENSTQMLPSC

SEQ ID NO: 4095 - protein, 47 aa, Homo sapiens
VAVALVAAAAAAAAALERFLSGSAGGPPGWSTCKSRSGAPGIDGDEL

SEQ ID NO: 4096 - protein, 57 aa, Homo sapiens
VAQEALIFLAGTVAAVLACGPGQPLPSRRAGEDWCMLGFVVRPHEARPGNIMGRNGA

SEQ ID NO: 4097 - protein, 217 aa, Homo sapiens
MRWRRTRLIPIIWRSWKTTTTPVTAQKAASGAIVPTAALQVPTQPSCCRLLPHLLCPPPLLTRVLCILLRSPPNPASPPNRGEMRGHIKWQKTRFTRGKRRIVKNGDCIVAVCRLHSLALSLPPNLLFFLFKICASAVSPPGRIETLANTYPLHSFLSPCFGLVFWNERSLLFYKPLCISNVVSFRFLLDMLLKRELRVWTDCGTQTHTKTCLFSHP

SEQ ID NO: 4098 - protein, 45 aa, Homo sapiens
KEVPSGTPFMAILMLHLLHFSEGPTPLKFSLEDEWVVVEILKKWK

SEQ ID NO: 4099 - protein, 26 aa, Homo sapiens
LCYLSLYALQNLFTLLFWKRIPEAKP

SEQ ID NO: 4100 - protein, 84 aa, Homo sapiens
IAAFRKCIRPTMEPTLMLLAGLLIMYRDSCIVVEFTTTQTGKIQIGSKKPKTRVSLLAAAERLPAIVMAAWPTLPTSMLRGVRL

SEQ ID NO: 4101 - protein, 41 aa, Homo sapiens
RRRSAVGSVSARGCGGAGGSSLSGFSLGGGGGGSVDASSAS

SEQ ID NO: 4102 - protein, 45 aa, Homo sapiens
LSILQSLVPAAGAASPVAISAQHLCYSHVTPGDPGAGAGQGPAPS

SEQ ID NO: 4103 - protein, 29 aa, Homo sapiens
ITDLLVTPLLAAHAAGTGAAEKGAPSSGK

SEQ ID NO: 4104 - protein, 35 aa, Homo sapiens
VFWLEYSAIGEDGRFVETTLPRTTFHHQICKKNHK

SEQ ID NO: 4105 - protein, 30 aa, Homo sapiens
LLWASTGAAAMALSSSAGVHPASWVPELPV

SEQ ID NO: 4106 - protein, 39 aa, Homo sapiens
LVPALGLRDCGLSPSGAAAMALSSSAGVHPASWVPELPV

SEQ ID NO: 4107 - protein, 144 aa, Homo sapiens
IPNLKPIAMFWQLQACILKISFGAIQSVFPATSWSWTISKLKCLLKYLIISTVPQSLSRDRKQSLISQLQEKSWEYRSWKTLLIATSQIPRVPMYSVLLKREWLKKKKMKKGMKNQPSLMGQGSQMHFPSSKQKIVITCFPRWT

SEQ ID NO: 4108 - protein, 24 aa, Homo sapiens
MASVSLLCFTASFLLREVPACAGM

SEQ ID NO: 4109 - protein, 12 aa, Homo sapiens
VFWKYLLCLRGL

SEQ ID NO: 4110 - protein, 39 aa, Homo sapiens
MTFLLTCPGTLFPEISPCSGKIATSLLTALQTTPVVLCP

SEQ ID NO: 4111 - protein, 50 aa, Homo sapiens
MKGMKSFETCLCLAMWDLTASLTSWSTSLLLKDSVSTSFVLVRQALANPR

SEQ ID NO: 4112 - protein, 56 aa, Homo sapiens
MFLLKYQPSAAREAAVSAAVAAAASLPTVLLGDLHIMLRNSFQSTSTQDQLPMSTC

SEQ ID NO: 4113 - protein, 30 aa, Homo sapiens
MASFSSSNPLVNLFLFSTRSRSLLISKRRL

SEQ ID NO: 4114 - protein, 63 aa, Homo sapiens
IFPTTTISVLFCSLCMLLSRSSKCMSRLKMNTLLVCFNNAARPFIMYILTINSPRCLASLKRD

SEQ ID NO: 4115 - protein, 18 aa, Homo sapiens
IVVFFLLYITSSSAVRWR

SEQ ID NO: 4116 - protein, 35 aa, Homo sapiens
LRAPAASPVLSLLWPSAGWVTENFPTVKNRASLDK

SEQ ID NO: 4117 - protein, 17 aa, Homo sapiens
IILCLVITHGLSLMNLF

SEQ ID NO: 4118 - protein, 22 aa, Homo sapiens
MCIFLKMLSFTLLMTDLISDMS

SEQ ID NO: 4119 - protein, 17 aa, Homo sapiens
MLWLCVMNQIVFILGMQ

SEQ ID NO: 4120 - protein, 14 aa, Homo sapiens
LQLFQTSTWMALMM

SEQ ID NO: 4121 - protein, 22 aa, Homo sapiens
VWIQIQLILMTVAMIGKSGLEI

SEQ ID NO: 4122 - protein, 59 aa, Homo sapiens
RSSSSNPWRRGWRRRRLSKAVCMWCIAGHPRPLLSGGHRPWTQGPPWTAWTASAAPWAS

SEQ ID NO: 4123 - protein, 32 aa, Homo sapiens
MLRTMTTTSRSCWAWMTLWCSSTGRSTYRSTC

SEQ ID NO: 4124 - protein, 18 aa, Homo sapiens
LFSVFLLSAHHMLCSLPI

SEQ ID NO: 4125 - protein, 19 aa, Homo sapiens
LVLASLGLWWPLHQTSLCL

SEQ ID NO: 4126 - protein, 23 aa, Homo sapiens
IPNLLFCFISPLGVVRRSSPCYP

SEQ ID NO: 4127 - protein, 25 aa, Homo sapiens
MGLWLLSWRVTMKIILLSSGMPLLL

SEQ ID NO: 4128 - protein, 47 aa, Homo sapiens
RPPRSPSCAVIHGKLLIPKIMYFIKSTSVEVWILSSAGHQVLFVCTT

SEQ ID NO: 4129 - protein, 30 aa, Homo sapiens
LKRPMTLAAGLLLMPLTETAILEALSICTT

SEQ ID NO: 4130 - protein, 28 aa, Homo sapiens
KTMDQLGVLFVLLGKCFHWNLVEDLILS

SEQ ID NO: 4131 - protein, 46 aa, Homo sapiens
IIVDLWFHLLLIFCMWQMMKKPVISDFEIVYGKMKKRKWKFFILCD

SEQ ID NO: 4132 - protein, 24 aa, Homo sapiens
LLFFSMLTWLAEASGCVIFEKGRK

SEQ ID NO: 4133 - protein, 91 aa, Homo sapiens
ISFLHIQVRWRLLWRLGPRALETSALAPASLLPWPGAAALPRRQHGWPPGRGLGGGGPAARRGRLLLHLQADPGSAAGRPRARDTLFEVRR

SEQ ID NO: 4134 - protein, 47 aa, Homo sapiens
MKMMKCNTMKGKNGAVITSTTGLTIPWKLFTTRWTTLPQTFLTWRGG

SEQ ID NO: 4135 - protein, 15 aa, Homo sapiens
LTSTLRGPALAMLLW

SEQ ID NO: 4136 - protein, 45 aa, Homo sapiens
LRPLSESMSTVKKMRGLLRSRLLSSLLLKAPLRLHRRDPLEDFSS

SEQ ID NO: 4137 - protein, 49 aa, Homo sapiens
RAMGWTSLTSRSASSLCPSLPAALRSPTCTTYRRSRACSSPSTGTTTWY

SEQ ID NO: 4138 - protein, 38 aa, Homo sapiens
MSGGTSSVRCPKSWGTSLWSAWISPVTASPESQSPSAA

SEQ ID NO: 4139 - protein, 29 aa, Homo sapiens
LFQSWGTSLWSAWISPVTASPESQSPSAA

SEQ ID NO: 4140 - protein, 23 aa, Homo sapiens
VLGMVLHVLAIFPLQRDAQDDKI

SEQ ID NO: 4141 - protein, 86 aa, Homo sapiens [sequence omitted]

SEQ ID NO: 4142 - protein, 63 aa, Homo sapiens
MASLAPAALLPPAPAGTTVLGPSPTKEQLRFPEVPGLAGGIVDASLTSLCMCPGCCAGRKNGG

SEQ ID NO: 4143 - protein, 16 aa, Homo sapiens
ISRPLRLCRSLALVLG

SEQ ID NO: 4144 - protein, 17 aa, Homo sapiens
MMLMVMEILMWMMPKFY

SEQ ID NO: 4145 - protein, 42 aa, Homo sapiens
MRLVLGTLWGGTEPNPVSAAWGLGPGVAKREEEGGSCCARNP

SEQ ID NO: 4146 - protein, 20 aa, Homo sapiens
RIVRTTTVFILSGRFSLLLC

SEQ ID NO: 4147 - protein, 17 aa, Homo sapiens
VATPAQSWILALAPLAT

SEQ ID NO: 4148 - protein, 36 aa, Homo sapiens
VTVMARAAAWTASASATRASQAWTVASTPAPVTATT

SEQ ID NO: 4149 - protein, 18 aa, Homo sapiens
KVTGLPAIIAAFLYLEKM

SEQ ID NO: 4150 - protein, 12 aa, Homo sapiens
MLTSILFILQCL

SEQ ID NO: 4151 - protein, 85 aa, Homo sapiens
ILRTQIPHSPMAAWTLLQARQTSAKPNRPETTLAPPYPHWNAVMKTCAITEGCTMFSLLPGVRPQDKETGISMMVAETLSPRCRS

SEQ ID NO: 4152 - protein, 37 aa, Homo sapiens
MRGVERSPPPTLAISAVLLGPLKEAEAKMTFQIFQPF

SEQ ID NO: 4153 - protein, 80 aa, Homo sapiens
MRLKEAVLPCVCRPGGELLFVLLALPPHPLLHTQLSPAGVWSSPAGSWETHSDTGSVSRVSNNVHSIGKFTPKISKCPRK

SEQ ID NO: 4154 - protein, 49 aa, Homo sapiens
RACSLFSAGVAGSEGSWSAFCRSLWLHAHRLRGYLPCYLIPYHTTGPQP

SEQ ID NO: 4155 - protein, 36 aa, Homo sapiens
MMLLSGAMSLTWAFRIRCAWLVGVSLRRGYWRCRWR

SEQ ID NO: 4156 - protein, 40 aa, Homo sapiens
MFFSLGFLLLFSPPSHLPFSPTPPPKKATSSFRGTIIFFN

SEQ ID NO: 4157 - protein, 18 aa, Homo sapiens
MRSSASGFIILTLCGQIV

SEQ ID NO: 4158 - protein, 16 aa, Homo sapiens
MLKFKIFIGHLAVMMS

SEQ ID NO: 4159 - protein, 34 aa, Homo sapiens
ITLLHVAFLLLGFCFCSELSCYLFRADVTCRWRV

SEQ ID NO: 4160 - protein, 58 aa, Homo sapiens
MLFTCVLAAPLPHTTPEPWGKTRMRSRPRRGRFLRTLSRHPRAKVPSRPSTFSHDTWT

SEQ ID NO: 4161 - protein, 51 aa, Homo sapiens
VSLTLWFMSCWLPWLSTRCLFHSDRRQMFSKCTKSSPLLMFCISNLKGTTI

SEQ ID NO: 4162 - protein, 9 aa, Homo sapiens
MSAWLFLLF

SEQ ID NO: 4163 - protein, 19 aa, Homo sapiens
IIKMTMVFTAGMAQAAMWK

SEQ ID NO: 4164 - protein, 29 aa, Homo sapiens
MPSRVVRRLLVMLSGKLSIPSPHPEFAAE

SEQ ID NO: 4165 - protein, 49 aa, Homo sapiens
IMLFCLWAMALTQPLGWITGLLKTAGAPAGVRMATSGSAEELMSVQLRA

SEQ ID NO: 4166 - protein, 36 aa, Homo sapiens
KLPFSVVLMFLSAGPIVPLLRNVSPVQGQRLKRLLY

SEQ ID NO: 4167 - protein, 30 aa, Homo sapiens
LQLLGFLWLPSLLEPGLHPSNHVQGTCSWY

SEQ ID NO: 4168 - protein, 11 aa, Homo sapiens
LIAVILATMQV

SEQ ID NO: 4169 - protein, 25 aa, Homo sapiens
MGSTFSGLTGCGGQCSGPTSTWAAT

SEQ ID NO: 4170 - protein, 31 aa, Homo sapiens
MCEFFSVSIWMCPVLSCVFSALSMVSFSENE

SEQ ID NO: 4171 - protein, 36 aa, Homo sapiens
TPSLAFLLSLISLFQRRPNLKSFPGSGSVHLIRQPK

SEQ ID NO: 4172 - protein, 44 aa, Homo sapiens
MEKLTLWLWLQRKMGPLCSSFLNGGSRARPSKKWQKPTDPWVQS

SEQ ID NO: 4173 - protein, 89 aa, Homo sapiens
MAAVMSTSLARSSTAVMAAGPTAAAAPMSTVSPAACSPTSNFSWSASSTGQPWHSRTSSWQSKITLSCAWPNAGPHLRACSMRTPTGTP

SEQ ID NO: 4174 - protein, 38 aa, Homo sapiens
MRSPLSASALLLWSSSVARAFSSPSLLMAVPSPTCSRY

SEQ ID NO: 4175 - protein, 32 aa, Homo sapiens
TMHLQILYSLMLLGTVLWTNLKSKGQAENRKV

SEQ ID NO: 4176 - protein, 21 aa, Homo sapiens
ILLQCRARFLLLLVLSQTQDL

SEQ ID NO: 4177 - protein, 35 aa, Homo sapiens
IWWPSGWAAHWVLVSTSWLELWPVRMQALPLSSPS

SEQ ID NO: 4178 - protein, 24 aa, Homo sapiens
MPWLHLLMIWISGFTSEMNLCVVD

SEQ ID NO: 4179 - protein, 9 aa, Homo sapiens
LCWLWLWQM

SEQ ID NO: 4180 - protein, 14 aa, Homo sapiens
MVLLLLLFVNSNEP

SEQ ID NO: 4181 - protein, 60 aa, Homo sapiens
IMTRSWLIVVSGVGTKAQMSVPFNRFWAPKRNTSALVRTGIKSPSVDRKRLCYMNVALVI

SEQ ID NO: 4182 - protein, 18 aa, Homo sapiens
IPVHFMLWLCRAQCFSFV

SEQ ID NO: 4183 - protein, 25 aa, Homo sapiens
LESLSRQRECWRMLVLWALLSSSGL

SEQ ID NO: 4184 - protein, 67 aa, Homo sapiens
MGGSSPRPCILKAAYLRACGLAAGTHPRGGAAIVSGAPAQAGRSSCFPLLCCLPGVPTWPRSVLPAP

SEQ ID NO: 4185 - protein, 25 aa, Homo sapiens
MLPKLISNFLAQVICLPSKVLGLQA

SEQ ID NO: 4186 - protein, 80 aa, Homo sapiens
IKMVLLMDMLTVWMEKLLSSVIVMIQKHKAVLFKMGRKKMQLIPYYSSIKCNPLKKNYMSLLLLKQHKSAGENTYFLVIN

SEQ ID NO: 4187 - protein, 13 aa, Homo sapiens
LLNFYLSFLALNM

SEQ ID NO: 4188 - protein, 10 aa, Homo sapiens
MIWCIIILLR

SEQ ID NO: 4189 - protein, 37 aa, Homo sapiens
LAGNFGFGALPAATLIVRSPLPPVVSSLAFWLCHALL

SEQ ID NO: 4190 - protein, 38 aa, Homo sapiens
MKFDFTLEMTLWMFGIGISAGQSRTILKVGRRVICQRY

SEQ ID NO: 4191 - protein, 95 aa, Homo sapiens
LSPRVGAARQGQPSTTGSPAVSRLTGRCCVGGAALAWVCMWVQPWEHCGSASQEPWRSRSLKTQWWHWWAPMPPCAAPSPLSLASAWHSSTSSGS

SEQ ID NO: 4192 - protein, 30 aa, Homo sapiens
LPTRTRTTGPGCAAGMCGWTAAGLLTMALA

SEQ ID NO: 4193 - protein, 7 aa, Homo sapiens
LIFLLLA

SEQ ID NO: 4194 - protein, 30 aa, Homo sapiens
TVPSGLILVLMGRIAGPRSTRRVGACCSPP

SEQ ID NO: 4195 - protein, 25 aa, Homo sapiens
LKKILVSFIFRLIICSLNITEHEKL

SEQ ID NO: 4196 - protein, 12 aa, Homo sapiens
MGGVGLVLLWLS

SEQ ID NO: 4197 - protein, 41 aa, Homo sapiens
KRRLMRMLCHCVCLQISPGLGWVHPTTDKMKWTLRAEQHTT

SEQ ID NO: 4198 - protein, 41 aa, Homo sapiens
MTTYATLPIYLLVLHQSKARKRMVPLTHIHLRDEDWYLTIS

SEQ ID NO: 4199 - protein, 56 aa, Homo sapiens
TPVWWRSWACMTLAWALPWGPIRASVSKASCSLAQRPRKKNTSPSWHLGRLWPLSV

SEQ ID NO: 4200 - protein, 30 aa, Homo sapiens
LPFLFFRCLLYFPKFLLLLCPLRPPPLGAP

SEQ ID NO: 4201 - protein, 8 aa, Homo sapiens
IWSILLVM

SEQ ID NO: 4202 - protein, 63 aa, Homo sapiens
TTMRSTLAASIPTISSQGSSGHPFTKDWIVLWKSVLYMGITPSSFRFTQKRGSTVMGNWAMNQ

SEQ ID NO: 4203 - protein, 30 aa, Homo sapiens
RRRWLFGGSEERLLLLLLLLVAPLQMYCCP

SEQ ID NO: 4204 - protein, 25 aa, Homo sapiens
MARARAVAAVAGGGGASSSSPRRRR

SEQ ID NO: 4205 - protein, 18 aa, Homo sapiens
RCFVVSVFLLFTLPESVL

SEQ ID NO: 4206 - protein, 53 aa, Homo sapiens
MNLLCIAPMFYSALMTSGRKMCCAMSPSLWRDSGSALTGPCWRHAAVTSTQES

SEQ ID NO: 4207 - protein, 69 aa, Homo sapiens
KRSSRRARTAAARRSTTTRGGAAASGCCSSASTSSASSWRASPSSSSRQAPSSLTTEGFTAMMRASSTH

SEQ ID NO: 4208 - protein, 53 aa, Homo sapiens
MMLMSLSEILSVLFLLHCTEPLRVECEVLIYVCLVELSYQEHIDALKDNPRRV

SEQ ID NO: 4209 - protein, 56 aa, Homo sapiens
TPLTSVYLRVRPILPAGLCLGVTLPELAPTTVATVMLMCDCCQEPAHMTVWRKFFP

SEQ ID NO: 4210 - protein, 80 aa, Homo sapiens
TGSPAVSRLTGRCCVGGAALAWVCMWVQPWEHCGSASQEPWRSRSLKTQWWHWWAPMPPCAAPSPLSLASAWHSSTSSGS

SEQ ID NO: 4211 - protein, 36 aa, Homo sapiens
LQLLPGNMSRAAAATAAAATWGRAAAAAAAAGTRGQ

SEQ ID NO: 4212 - protein, 28 aa, Homo sapiens
LLLLLSPAPAAPTRRPTSSWCAEVMFAP

SEQ ID NO: 4213 - protein, 22 aa, Homo sapiens
MMSLFIARLYMMLCKTWIRRLM

SEQ ID NO: 4214 - protein, 32 aa, Homo sapiens
MEYLEVLKLLFLMTLSCLTSLLSGGMILCTDG

SEQ ID NO: 4215 - protein, 68 aa, Homo sapiens
MTSTPMQPLQLLQDMLLLGAMATQSSSQSPQRHLGQLPPPLQQLLPLQHLASTSLSSCRQTECNRPAI

SEQ ID NO: 4216 - protein, 33 aa, Homo sapiens
MRGGTRFTLGLADLCTTGARALLRKAGFPLYLH

SEQ ID NO: 4217 - protein, 13 aa, Homo sapiens
MKCSFLTFLLQLV

SEQ ID NO: 4218 - protein, 23 aa, Homo sapiens
MRTGATAAIALCSSVSWCTANAK

SEQ ID NO: 4219 - protein, 38 aa, Homo sapiens
MELVVSWRAAWRRPGGASTLSGAGMSLSSSLKKRRPKS

SEQ ID NO: 4220 - protein, 65 aa, Homo sapiens
LGLRRRLRRGGCRWAGCLASLCAAWALSRDGRAGPGGRLSPAGDRRAGGSGTCRPGARVPVLGAE

SEQ ID NO: 4221 - protein, 117 aa, Homo sapiens
LGSGLAGALLGGPAASRGVRGARGLAVAELQHQLPSAGARWPGDLAAPKRDPEGFALVGAAAGGHSRAGDSARLLLPLRAAHTTGAWAHSHFPATRSRRADAAASLAAGGRELHPEL

SEQ ID NO: 4222 - protein, 34 aa, Homo sapiens
LSGVHLLPVLSLPGAPAAVAVESPWKCRKRHSAS

SEQ ID NO: 4223 - protein, 48 aa, Homo sapiens
LLAAPRLPARRHLVLGFHCSRWAGRFSVIAAGGGGGVTSGQPRNPTIL

SEQ ID NO: 4224 - protein, 139 aa, Homo sapiens
LNSLLSLACSPEALAPQCWAYLAILCQPPGHPPSQWKLLPPLTMVFLALGSGDKTISFHSWTTLCTQSAASYLPSCTGSEPPDLDFALGSFLGTCCSLASLEGSTGLGVRRWSSGCCFPTLGPWACSVLCIRCFLPASP

SEQ ID NO: 4225 - protein, 74 aa, Homo sapiens
LRRSLESVSSGRTFDGILMCLLCLIFSKTLTPTQASVIAADQKPEHFGSRQLRTWDEAPRQDAVLPGDPEDKKL

SEQ ID NO: 4226 - protein, 33 aa, Homo sapiens
LPLIAWFSLQSPAAVVGSCAFGCNKYVDYSRIN

SEQ ID NO: 4227 - protein, 34 aa, Homo sapiens
LAVFVIIRNLSDYLSFFFPFLLELLAVEEHHAYL

SEQ ID NO: 4228 - protein, 97 aa, Homo sapiens [sequence omitted]

SEQ ID NO: 4229 - protein, 105 aa, Homo sapiens
MLKCPRIRSATHAGVVRSPGRQRWRLLGVLGSLPPRPAPARLALRNSLFGAADFLVVPHKSKAWGPGGSRKYRFEIPKYYRGNGSGRRWQVWGRPEVTRPVGHGA

SEQ ID NO: 4230 - protein, 56 aa, Homo sapiens
MPFLQPSFSITTLLRALQPVVLRLTAMPSSPATSERPFDATATGLAHFPHSQFLFL

SEQ ID NO: 4231 - protein, 54 aa, Homo sapiens
LLASLVGSSSWPRQTGGGSGPDCGAMAVVSSFAAAASLAESPASALGAPTASAG

SEQ ID NO: 4232 - protein, 213 aa, Homo sapiens
MVSGRHGTTRRAAKRLRRSSVLPRRRRRPAAPSFPLPSPRAAPGDPAQHPAARLLPARPESYGDERRRRRPGDTAGVLYVSHRSEERKAAVSCGESRSLHCPRGARRLSRSKAGNGRQKRSQTPTGSGLPPRGSEQRSRASPARSCRHVPSCAARAPPCSESPVGAGLRPSPVPGPPPAPRCRTRRRPALGADNRRRASRRGCRRLRQTAAKA

SEQ ID NO: 4233 - protein, 104 aa, Homo sapiens
LTLLLPRVLSHLAAAAPVQTLTLPPKAQPSPNNPQPCTDVGCESLCLSKNQALLETFKQRLDNYFSRTERKLMHQKSLRNFWGPTINLQRPAFWTVLKTSQQEK

SEQ ID NO: 4234 - protein, 38 aa, Homo sapiens
LRVVVALGAVWSRSGPGLTAAWSVRHEEKPFFELLVVI

SEQ ID NO: 4235 - protein, 29 aa, Homo sapiens
LRVVVALGAVWSRSGPGLTAAWSVRHEEK

SEQ ID NO: 4236 - protein, 69 aa, Homo sapiens
MSRALQTQAAVSPASRAGTGPSASSPACLAPLARAANSSALTADMGRPVSQILATVSAVTLAGWGPGVL

SEQ ID NO: 4237 - protein, 100 aa, Homo sapiens
VQGPLAASSGPSSLPASPTPLGPEPPGSGGGCAEVRRPEPGSCRGSGWQQPCYRLDGAQDRAPRRGLGMGGGALSVLPVGACVWGAPLLWGLLRGVCGGV

SEQ ID NO: 4238 - protein, 76 aa, Homo sapiens
LGSAVSGVCAAPGSAIAALLAPGASAPDPSSFVCLPVSCVPGEDPAEPSLPPPLLLLSLGEPGQPLPRSPSDRRRP

SEQ ID NO: 4239 - protein, 38 aa, Homo sapiens
LSLFSILAPTSGFFLRDGPSDAWANGNRHLGCSAHRVA

SEQ ID NO: 4240 - protein, 35 aa, Homo sapiens
LTSARRAEPRALSRYLRPARAATLCPAFAIFCWQR

SEQ ID NO: 4241 - protein, 37 aa, Homo sapiens
LSWSEGWLFRLSFLPACTPPTASEEGAAPGCVHFLGT

SEQ ID NO: 4242 - protein, 13 aa, Homo sapiens
LSELRFVLVLCTL

SEQ ID NO: 4243 - protein, 53 aa, Homo sapiens
LVARSVLSFPVGDLCRKHAPPDHRSGQEASERKFVTALLMFSLVLLASGCAFW

SEQ ID NO: 4244 - protein, 37 aa, Homo sapiens
MCAFKPLIVRCWILEAVMAQMHILAEDNQLSDFTSLF

SEQ ID NO: 4245 - protein, 35 aa, Homo sapiens
MRSLGPLAALPSCSLWTLFLYHNSSRGLKCDVHKS

SEQ ID NO: 4246 - protein, 66 aa, Homo sapiens
VGGASGASRGLVGGARRALPVSGRGMRGGAGAAVGEFCCCGGACTLTVGNSETSSHLPVGNLLATG

SEQ ID NO: 4247 - protein, 17 aa, Homo sapiens
LSYLLKVHVLLMLTLID

SEQ ID NO: 4248 - protein, 44 aa, Homo sapiens
VELTIPQTSKPLQNPRRNRIQKDLLLLWISSKVLLWSSFKTRIP

SEQ ID NO: 4249 - protein, 36 aa, Homo sapiens
MKKGFKAGCLRRGVTFLQILHAVHLCPRRTTAAHDS

SEQ ID NO: 4250 - protein, 94 aa, Homo sapiens
LLRPSKDSRVGWTLNFELLFYFLFSRTHFLPSGVGAKSVAAVINCAQLGKESQDLWGGWDQKFLSKFSGEGEGPSQKLEGSGLTEKETNVSNHF

SEQ ID NO: 4251 - protein, 173 aa, Homo sapiens [sequence omitted]

SEQ ID NO: 4252 - protein, 45 aa, Homo sapiens
MALMKMTGMAGVSSFSRASAMTPVWVSQRAPAGTVWLRVRCAASK

SEQ ID NO: 4253 - protein, 56 aa, Homo sapiens
LMKMTGMAGVSSFSRASAMTPVWVSQRAPAGTVWLRVRCAARVAAAGEWVRLGQPA

SEQ ID NO: 4254 - protein, 40 aa, Homo sapiens
LATVFLLICDSLLLLCSFTSCVSREMKERPANSLQPVDSK

SEQ ID NO: 4255 - protein, 33 aa, Homo sapiens
MFFSRAFGWCVALPTFTFWTSSLRNALSDHAEV

SEQ ID NO: 4256 - protein, 76 aa, Homo sapiens
MPVVVFLCVLIHSKGSRCRMPLLLWGQTLLSLSVSISTVLPQHQSMHQGSTQAQLSPPPSSSLTFTKGWLSSPWVP

SEQ ID NO: 4257 - protein, 80 aa, Homo sapiens
MPPTVRRGCWARPGWSLGLAGAAQNCLLRKRCSPGPPLSPGLSKASEVLPSSRLDSSVICLRPHSRVQLETEKPARGRGR

SEQ ID NO: 4258 - protein, 26 aa, Homo sapiens
LLLCSLGMLLCLCIWSLFGATVDRHL

SEQ ID NO: 4259 - protein, 44 aa, Homo sapiens
LKIRRCNKMFLAFPPAFFFFFDFALESQSFRIFFTILFKKSFTV

SEQ ID NO: 4260 - protein, 94 aa, Homo sapiens
VATSGPWGWARSFCFWLASSLLHLRELLLSPTVFVITSRCCPGMDLCSQGFLLRYIWMVSPSCAMTGRNAGQSPRDSGQKMSWEIRHGTERPGT

SEQ ID NO: 4261 - protein, 43 aa, Homo sapiens
LGSGIRSAPAVVAAAAAAIAAGLPQAQGLCLKALCRAKLISGT

SEQ ID NO: 4262 - protein, 79 aa, Homo sapiens
LYLSGPVLVMISLLTEAVPQKQTCNRRNRSQCHPSAVVTSKKVSRHGQMSPGGQNHPQLRTTALNYGVSLCHPGWSTVA

SEQ ID NO: 4263 - protein, 77 aa, Homo sapiens
LTCPVLVMISLLTEAVPQKQTCNRRNRSQCHPSAVVTSKKVSRHGQMSPGGQNHPQLRTTALNYGVSLCHPGWSTVA

SEQ ID NO: 4264 - protein, 76 aa, Homo sapiens
MRMAPLEILSCFWFPWQGLNCGVCGLLSRDGIHCGRRRHSSAPRIPQGAPRCLPSKSVLQLEGAGAVHGRGGHAPL

SEQ ID NO: 4265 - protein, 51 aa, Homo sapiens
VTLSTRARGSVRSGRFAVAGAWAAGCLTSLPLAHSDLCSDPGCHDSRNPYL

SEQ ID NO: 4266 - protein, 83 aa, Homo sapiens
LLKVSLWVIAPSLFNGSLPASILVLWERPAFWCCSQEWSLTALWKPHRRKTLICPRSCLTPPLDRPSPRFYTVLPARRHDEAM

SEQ ID NO: 4267 - protein, 55 aa, Homo sapiens
LARPVLGLLLLLTTTTTTGAASAVPGVSSCSGHTAPGDCSSSNQNLGLTGTLAPK

SEQ ID NO: 4268 - protein, 81 aa, Homo sapiens [sequence omitted]

SEQ ID NO: 4269 - protein, 36 aa, Homo sapiens
LGLGLASLLLSLQTAYHETSSCDRTHSKNLLCFKIV

SEQ ID NO: 4270 - protein, 40 aa, Homo sapiens
MIAFLFVRFVYIFRIRKKSHKPMMVSYPCLKIWTEGNNLF

SEQ ID NO: 4271 - protein, 13 aa, Homo sapiens
MKLKNHLLLCLWI

SEQ ID NO: 4272 - protein, 34 aa, Homo sapiens
MAQAIICGALSVVCPAGRAGVTSARNPDGPDRPR

SEQ ID NO: 4273 - protein, 30 aa, Homo sapiens
MRILLWAFWPIPAPQSCRDGTARIGLPGLG

SEQ ID NO: 4274 - protein, 345 aa, Homo sapiens
LAAGTAAGAAPGLRGARGLPLAAAAAAAANVPAARRAPGRPRLAGGASLPRDLRAPAALAPAGLRVLRGRRGLRRACYGPGRRLRPPTLRLVAAPAAGPRGCSALVGEPRSSPCAQRAAPRQGAEPEDEPAAGAAVRGLRAALLCRPAGGRVVVRARGRLGGRGPVGGAARGGDGQQRSQSLRLPLLPGGRLPAPATAAEAAGLSVLRAAGRRGGRGGAPGPPGALPPTLAPPSLSPCSAGTAGRGRLAPTPSAPQTPALLLRKCLLGAWWSETGHLSLRRNLQGTRGLPGSVQITRGRRVCERVTLKLSPSSTLLFPSHVYISLCSSSFSSSLQFLSYLPIWRQ

SEQ ID NO: 4275 - protein, 35 aa, Homo sapiens
MDTCPLCLSAGFCAAGSGHSTRPADSSCRLHHPLH

SEQ ID NO: 4276 - protein, 100 aa, Homo sapiens
LCASGVCAWSFSAWICLFIALLVETPKPVHPAKTPRAACGSRTLHPFPGCPLQAREAIRACWLRPPLSQAWLSPLRGRSPATPRGAGIPGMQAHSAGLHP

SEQ ID NO: 4277 - protein, 97 aa, Homo sapiens
MWWPAGRPAPTAPPEKVSQGPTLMPESLSCQFPQLLLCLLFSASARFTVQAAKSQGLGLRVVRGGKWVAGRKEHQGGWGQASDEERDRGGMGTGCAS

SEQ ID NO: 4278 - protein, 34 aa, Homo sapiens
LRKKLKLTVDILCLSSAANRAVSRAATMMILAGS

SEQ ID NO: 4279 - protein, 89 aa, Homo sapiens
MQMRSVWPGTKRQTRRRRRWCPEGARCPSAAASAATRVSGWCTEPRAPSPTGARAAGPRPRGPACCPSTRPSAAPWRRISRPTQSCWRR

SEQ ID NO: 4280 - protein, 82 aa, Homo sapiens
LQHSLPVFPLPLASSSSATPFTCPRPPPSYNCTVPLKAFSDFLHLPSSLFSLSLYHPDSYPTPRMAPSGSLFSSSLSLELQP

SEQ ID NO: 4281 - protein, 224 aa, Homo sapiens
LRRWSGEPGFSPPAPSFSSLFSFPLLSLRPPAAAPQERGRFPGCSPLLSLVCPLVFPRSAEGTGWRLGSVRGRGQERGLRACRRCPASRSAGAAGQPGPALRPSAVSRGRPGWGRVTLRPAPAWWGLRGAGPPRAQGVPRRCGSSVPLFAESWASKECSAGPRGGQQVPLAPPGLLWWEPTRTVASLRLQATLEHRRGGRSGLEGFTPQQSSEPNPGLRDPPGA

SEQ ID NO: 4282 - protein, 41 aa, Homo sapiens
LAGSGAVRLGVAGGASICVAAARGVPGLVLRRPPSGGSGCF

SEQ ID NO: 4283 - protein, 60 aa, Homo sapiens
VRTRFLPMNLLCIAPMFYSALMTSGRKMCCAMSPSLWRDSGSALTGPCWRHAAVTSTQES

SEQ ID NO: 4284 - protein, 30 aa, Homo sapiens
VKGIHLCLSTMALMIHCWGEETRKVTGCHL

SEQ ID NO: 4285 - protein, 9 aa, Homo sapiens
LLGFSVMMV

SEQ ID NO: 4286 - protein, 43 aa, Homo sapiens
LRALCPGHLAALHLPATSPPRPWAQEFCCSCWWPQLGMVRESQ

SEQ ID NO: 4287 - protein, 51 aa, Homo sapiens
VVFFFLFFFFFLIRGYGVLLCLPGWSAVTQSQLTVTSASWVQETLLPQPPW

SEQ ID NO: 4288 - protein, 55 aa, Homo sapiens
LFCFIFVFLYLLGLFCLNPSTAGRLINHTENVEGFMGEGVEMWVFETKVYKQMNC

SEQ ID NO: 4289 - protein, 34 aa, Homo sapiens
LIFKLLFYDLFLMIEPELVETTLIISRSLQETGA

SEQ ID NO: 4290 - protein, 51 aa, Homo sapiens
MRPAPHSVPLCATPCQALRAPGCCFLPSFPKDYQRQVAGPGGGSGGGLAMW

SEQ ID NO: 4291 - protein, 347 aa, Homo sapiens
MTAVWTATARPGPPRAPPPCSAACCCWGWPPAWAAEPRPEDAPRTRRPGVPGSRGGAGVRGRAVRRVRPEVLPGATQQGPPPGPRSRPHCPPPAAGAPWDSGPRACDLVSFFFCIIRRPVPFLSFSLSLFFFFFLAVSQRVGRNAARPTPRPASHHTYTHGTVADTPWPVPGSRAAADPDLQLPTIPVADLVLFSILYFSCNPPDPRPHRRPGDHGTHRLGEEERRKGWGAWKLRSVENYFCLYSLSPARGTGREHWSPRGPMVENPRSKEFAHCCLHGLFSFCVGDGGQVWGLQRNPQHSLKETVSLLGPPFPWAFLWIPAGSAPSPQAWLAEFSTPRPGCRCPTC

SEQ ID NO: 4292 - protein, 18 aa, Homo sapiens
LSLTSWALASALLLVMWC

SEQ ID NO: 4293 - protein, 65 aa, Homo sapiens
LSSRGFPLLFLPPPAPVHLQMPSPGPLKSQSCPLFLLPPTSPCSPAAALPWSRVPGAAPCSPTSH

SEQ ID NO: 4294 - protein, 11 aa, Homo sapiens
LCFLFGSIGVL

SEQ ID NO: 4295 - protein, 47 aa, Homo sapiens [sequence omitted]

SEQ ID NO: 4296 - protein, 69 aa, Homo sapiens
LAAVALASGGLGLCGASSVLQKGSSSSRPGRGCRRPGRSRGGLQPGLAPRGTGPAARRAHLSHSRLAAL

SEQ ID NO: 4297 - protein, 92 aa, Homo sapiens
LPLASVFFLRPSLALWLRLECSGVITAHCSLSLLSPQPLGSWDHQRAPPLPATFFCIFSRDVGLAMLARLLPNSGAQAIRPPGPPKVLRLQA

SEQ ID NO: 4298 - protein, 22 aa, Homo sapiens
LVITVIFLTTLFYRSLSENDTC

SEQ ID NO: 4299 - protein, 62 aa, Homo sapiens
LQQLPQLRGRPDGMHAGQAAGQVLSGPAGAATALAALGLLPAEASPAHPQVPPAAPGNCQAF

SEQ ID NO: 4300 - protein, 44 aa, Homo sapiens
LLPSARPAALLFAVGAAPGAGPRAEPRRLQRRGPARRPGNFAES

SEQ ID NO: 4301 - protein, 25 aa, Homo sapiens
VVTFWLFARLLLCGVFHPRYGGHRG

SEQ ID NO: 4302 - protein, 37 aa, Homo sapiens
MGRAGKQKRIRVLFTLWRVSPRTVAWASPSSFVLCFL

SEQ ID NO: 4303 - protein, 76 aa, Homo sapiens
LLSALLCFSKAFQQQHEVGSLPPPVILIIFSLEVQELQAAGDRLLGTCVELCTGDWDCNPGDHCVSNGCGHECVAG

SEQ ID NO: 4304 - protein, 80 aa, Homo sapiens
LGATARASRCAPRAPGSMELPLRAARPAPRRARSLLCGQVIGLAVLRPQAAAAPQRWSPKSSSSTWEVTSCSPWMALCSP

SEQ ID NO: 4305 - protein, 7 aa, Homo sapiens
VWLWLAA

SEQ ID NO: 4306 - protein, 74 aa, Homo sapiens
LGKGACAGSCVLLVLRIFSKLKAESQGPCVLPWYLLTFRECFPLPSTGTQRLDLLRTSEKDCPYHPHHSKTLEP

SEQ ID NO: 4307 - protein, 48 aa, Homo sapiens
LGKGACAGSCVLLVLRIFSKLKAESQGPCVLPWYLLTFRECFPLPSTG

SEQ ID NO: 4308 - protein, 49 aa, Homo sapiens
LGKGACAGSCVLLVLRIFSKLKAESQGPCVLPWYLLTFRECFPLPSTGS

SEQ ID NO: 4309 - protein, 78 aa, Homo sapiens
MLQTLPAPSSMLCLCSASLMQRRKSGYPLRMMSTLNTPSILWRSTRTLKLLGIVMTPVPCHWMRAPALPTPCAGTIGL

SEQ ID NO: 4310 - protein, 53 aa, Homo sapiens
LYGWWFLVLWGQVPPAIVQAAVCKPKKHEDTGRLLGDSPAPPHPGAAALRQPD

SEQ ID NO: 4311 - protein, 30 aa, Homo sapiens
LHISTVALMSMLTASMLDRQSFYCWIVQDI

SEQ ID NO: 4312 - protein, 16 aa, Homo sapiens
LELRAKTFLTFLLLNI

SEQ ID NO: 4313 - protein, 48 aa, Homo sapiens
LRGSGLSGSSSCFLARPMTIFARLHCTFSQVSSLSLMCDTSSWTRYFS

SEQ ID NO: 4314 - protein, 33 aa, Homo sapiens
VRHPPARKGLMRTGATAAIALCSSVSWCTANAK

SEQ ID NO: 4315 - protein, 16 aa, Homo sapiens
LRRKGWLWICCLLRSL

SEQ ID NO: 4316 - protein, 58 aa, Homo sapiens
LPPTFQYLLICSMNENGKFPGLPSAQLSCLPPFASAAHASLSSVFCAWTLWAHPGHGG

SEQ ID NO: 4317 - protein, 145 aa, Homo sapiens [sequence omitted]

SEQ ID NO: 4318 - protein, 33 aa, Homo sapiens
LRVAWDAERDTRARSYVSAAAAAASVAAATSSP

SEQ ID NO: 4319 - protein, 95 aa, Homo sapiens
MHAHSASLWVAFFYRSPFLFFTTGPPPPTSSSPAGLPLLESTVDASRPNWLPLLLSPPLPFLSIECTLYNFSGIVIENKIFTIITGFFQVTSCRL

SEQ ID NO: 4320 - protein, 74 aa, Homo sapiens
MALKTALSLCMPLSSSSCHHRLILRWIPASSTTMCSEHVEEKKQLYLLVSFCLSSWTLTFSETQQSLQWSVGPP

SEQ ID NO: 4321 - protein, 46 aa, Homo sapiens
IDENGKFPGFPSAQLSCLPLLGPAAHSLLSSVFCAWTLWAHPGHGG

SEQ ID NO: 4322 - protein, 26 aa, Homo sapiens
LAFALGWCWKLLVVARSLLHCKGVRI

SEQ ID NO: 4323 - protein, 37 aa, Homo sapiens
VSSSALFLLYFIHNSQRCWTRMGRPPVAMSPPRCSWG

SEQ ID NO: 4324 - protein, 40 aa, Homo sapiens
KHCQKTLSMGLCWMRVLLTQVYTSISGQQKRRMTQAWCIK

SEQ ID NO: 4325 - protein, 46 aa, Homo sapiens
RHSGQCLLHLLGTSGAAAPAPGSERRVPEIPASLRPTVVRGESCKC

SEQ ID NO: 4326 - protein, 37 aa, Homo sapiens
KELVLGAPWFRRQPPASSSFCCCSWGLCLLPTPALCP

SEQ ID NO: 4327 - protein, 16 aa, Homo sapiens
IELPFAFAFFTFAFST

SEQ ID NO: 4328 - protein, 41 aa, Homo sapiens
LAPSRDALSFFLLFLLLPLFASPANAVGAARRSGAARDRAT

SEQ ID NO: 4329 - protein, 39 aa, Homo sapiens
VCMEGLAWVSMEGLAWVCMEGLAWVSMEGLAWVCTEGLV

SEQ ID NO: 4330 - protein, 56 aa, Homo sapiens
IPRHMPAAYSRFLSWCLLALGEEAKLWLPASRAKRVRPWIETVTSIGNAERGTTWL

SEQ ID NO: 4331 - protein, 41 aa, Homo sapiens
LLIAWVVVGVSLQRRILTVKKQSGSRGPPLIPQGPDGGQRG

SEQ ID NO: 4332 - protein, 67 aa, Homo sapiens
VGEREAFTHALVAAFCTCFSAQVSVQRNWLPRNPNCSFRVSSAILRVELGACRHFPNLGGPGLDFHE

SEQ ID NO: 4333 - protein, 33 aa, Homo sapiens
MHVSHTLATLAASALQSPSPRPLVGSLVHTGGK

SEQ ID NO: 4334 - protein, 140 aa, Homo sapiens
MVLLVLLVLLASLVPEAPLDPRAPAALLVPRVTAVNLVLLAAKETLVLRESLALLVFKDPLALLERKESEELEVNPDPLACPDPLASVVDLVAVVSLAQMVLLVPRVPLVNVVLLALLAPKDLLVKLVVPVKLVCLVPRV

SEQ ID NO: 4335 - protein, 71 aa, Homo sapiens
MRSSTSCSSWTPASPPTTRSWVTSTTIMAAAAAVGAAGPQPQPQPLRAPVRSCCGSWSSGCRSPAPCAWPG

SEQ ID NO: 4336 - protein, 46 aa, Homo sapiens
MLTLSLQPWSPLSLAVLPACLETFNLYPSPLSPEASSSGVWLPLGG

SEQ ID NO: 4337 - protein, 45 aa, Homo sapiens
MTLLLLLKSPYLAFLKFQGSLCATYHSPLTLVPSGPIVDGCMGAM

SEQ ID NO: 4338 - protein, 79 aa, Homo sapiens
MSRPAAAAAAAAAALSFVSRAVWARAGVPGTPPPPSFPQDSSLLALGPNGARLPGGRSAHRARLPLLLPDHLVSTRNEI

SEQ ID NO: 4339 - protein, 45 aa, Homo sapiens
MLKYRFPAGTMALSSVAQWSSSEDAKIHEKTSRTSGRIFNGKSLG

SEQ ID NO: 4340 - protein, 51 aa, Homo sapiens
LGVPLGLVWGRSASLVVLAVTGSSSSKDKGPDSRSSTLATPLLPLLAPDGQ

SEQ ID NO: 4341 - protein, 97 aa, Homo sapiens
RTFYVALLLWPMCCILCPQCATGPQRNVCLSNHGSGAVWQECKSGWRPGSPPGALHPPSRRTQQHDALRRSHCVQAPHLPGTALLRVPPSRNEGVHP

SEQ ID NO: 4342 - protein, 53 aa, Homo sapiens
KFEINSKLPATLSLPLMCTPCKQAAAEHSRDALECENAKPQTENIQMLGSPYR

SEQ ID NO: 4343 - protein, 35 aa, Homo sapiens [sequence omitted]

SEQ ID NO: 4344 - protein, 16 aa, Homo sapiens
MNFYITVHVLCFAVIP

SEQ ID NO: 4345 - protein, 31 aa, Homo sapiens
MRELLLCLLMEVFTAQGFLILIQEIRSWYGD

SEQ ID NO: 4346 - protein, 37 aa, Homo sapiens
KLVAKGRRRGLSFRGSLPFLCCRSVTLALSPCLDHFL

SEQ ID NO: 4347 - protein, 49 aa, Homo sapiens
VAVAVALVAAAAAAAAALERFLSGSAGGPPGWSTCKSRSGAPGIDGDEL

SEQ ID NO: 4348 - protein, 23 aa, Homo sapiens
LPVLLLPALLPSLRRRAQQGPDA

SEQ ID NO: 4349 - protein, 23 aa, Homo sapiens
MVSIHILLLPALLKSCSHLSASQ

SEQ ID NO: 4350 - protein, 7 aa, Homo sapiens
MVLYIFI

SEQ ID NO: 4351 - protein, 33 aa, Homo sapiens
MRRIHLGLAFALGWCWKLLVVARSLLHCKGVRI

SEQ ID NO: 4352 - protein, 27 aa, Homo sapiens
KMAAVSVWGISAVRPGAPGSRLSFLPA

SEQ ID NO: 4353 - protein, 53 aa, Homo sapiens
VAVGLALSPAPFSSLSLPLSFAPKSASQPRRVVTEPLRLFLARVLRPRLPRHE

SEQ ID NO: 4354 - protein, 54 aa, Homo sapiens
LLLPSSHFLVCSAAVWAWAMRQGRFPIRAPTCPQSLERDSNPASMSRSLQPPSS

SEQ ID NO: 4355 - protein, 12 aa, Homo sapiens
MKVLIAWGVLIT

SEQ ID NO: 4356 - protein, 71 aa, Homo sapiens
KRPLLSSAILTFLTYLMKMSFERCTARNKMFVNSPFTKVDNYCTFLMEKVLFKVLFLIEYYQKGKKNDLNF

SEQ ID NO: 4357 - protein, 26 aa, Homo sapiens
MLHFFHDSGWFFLYLECFSSVVPLPL

SEQ ID NO: 4358 - protein, 53 aa, Homo sapiens
MNTVFPSTSTPWPPPSSRRCFRQIPLPAQPLTSCLMTSSLLLAISLPVSPSPA

SEQ ID NO: 4359 - protein, 10 aa, Homo sapiens
MMITLLMFLL

SEQ ID NO: 4360 - protein, 73 aa, Homo sapiens
MGRLRPWLCVPLRVGAGLGPNSTAAGFSLISEPRRWQSGRPGQVNPRAAGAQAPTPAQRGRKGPPPAQRAQRP

SEQ ID NO: 4361 - protein, 41 aa, Homo sapiens
LAAWFVQRVAVMALVSGLHGVHLESGARLCVQFGSVTKRCN

SEQ ID NO: 4362 - protein, 52 aa, Homo sapiens
MPAAYSRFLSWCLLALGEEAKLWLPASRAKRVRPWIETVTSIGNAERGTTWL

SEQ ID NO: 4363 - protein, 28 aa, Homo sapiens
KVLHMIRKQLWKMTAFISLNILPYGTDQ

SEQ ID NO: 4364 - protein, 16 aa, Homo sapiens
IHKILVCIFLNTVHVP

SEQ ID NO: 4365 - protein, 9 aa, Homo sapiens
MVNLLFFLS

SEQ ID NO: 4366 - protein, 52 aa, Homo sapiens
ISLLPLGQACFTAGPASGASTDRGSEASQAPTRSPNAHALRSAPGGGRRSRR

SEQ ID NO: 4367 - protein, 42 aa, Homo sapiens
RRSKQPLEDQHSRDYGGPSVFSVTGAMLTSVSWTHSDSGAFT

SEQ ID NO: 4368 - protein, 37 aa, Homo sapiens
MTLSLCWASPCCWEPPGPWPSFLLASSCCPSCSSSPS

SEQ ID NO: 4369 - protein, 36 aa, Homo sapiens
RFLTWVHWMTLRFGVLLIPSCRLHCCDPSSSPKDAS

SEQ ID NO: 4370 - protein, 84 aa, Homo sapiens
RECSSDAVTWAGALGLASALVAARPALWSHGLPGRTPRLSPSRPQPPDDPLLPSLSPTVGLAEDGARPGPRGAAQVLGGREPGA

SEQ ID NO: 4371 - protein, 36 aa, Homo sapiens
MNLTGLSSALCGHSSATQSPREVQSPAAPRAPGPSQ

SEQ ID NO: 4372 - protein, 30 aa, Homo sapiens
ILGTNMLLFPLFLLLSLDLCQKEGYAESLI

SEQ ID NO: 4373 - protein, 81 aa, Homo sapiens
LVPSSSTPFSLGPMGTCTAWCEAATVSLSLRLPCSSARWPPPWRTVTSTVWSCVISSCVALSSLTVRGRSWCWRTWRTPAC

SEQ ID NO: 4374 - protein, 83 aa, Homo sapiens
KREQLGRGSPSSRSLERLKFTFQPLAPFAPLGLASEAVAVLGRRLGGAGCEQGLRATLLLATGFCCEVRPGNGGKKELREAVG

SEQ ID NO: 4375 - protein, 9 aa, Homo sapiens
IFLFLILEM

SEQ ID NO: 4376 - protein, 9 aa, Homo sapiens
LPTLLLLGF

SEQ ID NO: 4377 - protein, 40 aa, Homo sapiens
RIKRWSSELPWRHFFTLLWGFWFHVWRNPSSARQKYSKRK

SEQ ID NO: 4378 - protein, 131 aa, Homo sapiens
LLRMSEHRNEALGNYLEMRLKSSFLRGLGSWKSNPLRLGGWTILLTLTMGQGEPGGPQGDPWVPHELLLPSLCDSSHASSWGSGSITCAWRGGDSSSHPLVSGHILSNSPVAAVMCSSMGTHLSPFKGTLL

SEQ ID NO: 4379 - protein, 50 aa, Homo sapiens
KDIGGGLALKLLFKTRKRRRKRKKRKMLGNIYLTCSTARTLASCCYSCKY

SEQ ID NO: 4380 - protein, 57 aa, Homo sapiens
LGRWRLCRCMLHQLEASLLITAAGMPSWKPILQRGDTSFQRSGKLARPSLGWSIRMA

SEQ ID NO: 4381 - protein, 11 aa, Homo sapiens
IIILSLAIVCP

SEQ ID NO: 4382 - protein, 61 aa, Homo sapiens
RHSRKLGMWRTGLGASSWTCAPLPLHWNMSTKGSCSLPLPSPCSLPQPYPSYLTRRGKEGG

SEQ ID NO: 4383 - protein, 31 aa, Homo sapiens
LRAVALAAATGSGGDRLCSRLGLLLLLRGHP

SEQ ID NO: 4384 - protein, 80 aa, Homo sapiens
VHSTRVLNLRRFLRGAAWMLLSPTRCISCCHQESSLASQGLRKYHQSDSTVLCPLRGRRKRMPCRTAHSVPLCSRTPSIM

SEQ ID NO: 4385 - protein, 44 aa, Homo sapiens [sequence omitted]

SEQ ID NO: 4386 - protein, 15 aa, Homo sapiens
VQERWGLLIILFCLF

SEQ ID NO: 4387 - protein, 33 aa, Homo sapiens
MVPDFSLLFSVSATTVLAQALHISHMNACRTVP

SEQ ID NO: 4388 - protein, 50 aa, Homo sapiens
LLSHRVSIKRKIMQSCKMLISFLLLSFLTASRLTGYSKPSGAYLLFFSTS

SEQ ID NO: 4389 - protein, 46 aa, Homo sapiens
LRRYRKGRSRCFLGSQSFTETLAIPFGMFTGTPVLSCLSYASSTPY

SEQ ID NO: 4390 - protein, 58 aa, Homo sapiens
LKPFLALCLSATSLGANGHELRLSKVSSTLGLRSPWQSPRCLRYHGRNDHPGSGRSHG

SEQ ID NO: 4391 - protein, 38 aa, Homo sapiens
VVALIFFLHASCPGSLSQACLHQVEANCPACLKNMCFL

SEQ ID NO: 4392 - protein, 32 aa, Homo sapiens
LHMVLLTFWKVSLSSSGRISISLSNSHLPFSP

SEQ ID NO: 4393 - protein, 17 aa, Homo sapiens
LLISFVTFGLLLLPHTH

SEQ ID NO: 4394 - protein, 44 aa, Homo sapiens
MRPVVLLSVSLRRTEAHLPPCLLRPGLVTASAEEITTALELLVC

SEQ ID NO: 4395 - protein, 11 aa, Homo sapiens
VLALSWLLHVG

SEQ ID NO: 4396 - protein, 14 aa, Homo sapiens
LKQLGYVCLLYFLF

SEQ ID NO: 4397 - protein, 29 aa, Homo sapiens
MEKTRALSSWHHLSFLLIASFSSELHLAN

SEQ ID NO: 4398 - protein, 15 aa, Homo sapiens
LGVCMALHVCVFVSV

SEQ ID NO: 4399 - protein, 24 aa, Homo sapiens
LQRMHTSGRGWGTTCLLVLLASDE

SEQ ID NO: 4400 - protein, 39 aa, Homo sapiens
LRAGKHSAAHPLKIVYLPLLLLSYNAWKQEMGSAAANRT

SEQ ID NO: 4401 - protein, 38 aa, Homo sapiens
LAGKHSAAHPLKIVYLPLLLLSYNAWKQEMGSAAANRT

SEQ ID NO: 4402 - protein, 20 aa, Homo sapiens
MGKRVWLWMVISCWQVVKLI

SEQ ID NO: 4403 - protein, 14 aa, Homo sapiens
MFPRHSVLAFTSVL

SEQ ID NO: 4404 - protein, 68 aa, Homo sapiens
MTLLNWKLRLPLGHFGLLMPGSTGQGGSYSVGCMADLTTKGKLDYCSTMEILSGLFHGSGTTSSFPTS

SEQ ID NO: 4405 - protein, 40 aa, Homo sapiens
KGHRPSGLLSTACLCLATQCSAGSSAMCSTNSSEMDTRTS

SEQ ID NO: 4406 - protein, 9 aa, Homo sapiens
MKTYFMFLI

SEQ ID NO: 4407 - protein, 54 aa, Homo sapiens [sequence omitted]

SEQ ID NO: 4408 - protein, 33 aa, Homo sapiens
LQALGCSAGVLLCLPGWCAVVRPRLTAASATQM

SEQ ID NO: 4409 - protein, 8 aa, Homo sapiens
LGFLLVAA

SEQ ID NO: 4410 - protein, 34 aa, Homo sapiens
IWKAWAVLGLGTGGYGLIDDSEGEKTPWVPSQKE

SEQ ID NO: 4411 - protein, 76 aa, Homo sapiens
RTFLSPSTATLMNGRYGRAALTQFCTLTCGGGQTSCWWLLLMPTLWGRWPVASVTTCLPASCGPGTAASPCSSARP

SEQ ID NO: 4412 - protein, 67 aa, Homo sapiens
MTPMPTAMVQVAMSPTGMSLEAHLSGAHTAPPQATARTQPCWRPLRAARAQTLRAHPHPAVPLPTAS

SEQ ID NO: 4413 - protein, 41 aa, Homo sapiens
VARVSSALRSRPLALLPSAPASLRVSRSSSSPTRPVPHGSG

SEQ ID NO: 4414 - protein, 32 aa, Homo sapiens
VAGAAAASGLGLLGRLLPGEQLRPCRLKNGRI

SEQ ID NO: 4415 - protein, 37 aa, Homo sapiens
VDPGPVVLGLSLWVLAGGMGEGGEQLPAPLLCGSSFF

SEQ ID NO: 4416 - protein, 90 aa, Homo sapiens
KMKLGGHSWICLLHFQLCSTSQRFLKNEDISALSSGGEVCLASASTLLLFTRCMHALSESGLCFPSRRDHPPRLAWDIFTSRHCIFLFAI

SEQ ID NO: 4417 - protein, 27 aa, Homo sapiens
TCGFYLLAILLCGRVVLTLHPRGPFLA

SEQ ID NO: 4418 - protein, 17 aa, Homo sapiens
IFSALFMCGFLSPLPWS

SEQ ID NO: 4419 - protein, 41 aa, Homo sapiens
LLRNGARNAFLCVSCLFVFQLREESIRQMECTCEDEETENK

SEQ ID NO: 4420 - protein, 14 aa, Homo sapiens
LSDFNLLMALAVLF

SEQ ID NO: 4421 - protein, 163 aa, Homo sapiens
LRELPPGGREVQLLLGLCSPPRVSLASFPKAAQSWYEVRVGGSRPAWLLTATPGLVSRSLASITHPHQKLAAAATARAGGSSPRLDLQNLSFASKPSFQLGEGEEGAVAAVLLALSPFLSFSFCVQVTLHGILFFWDFVIFSNMSWDLRSCNGDAKDTVSGLS

SEQ ID NO: 4422 - protein, 38 aa, Homo sapiens
MRSQSSFFCFSPTSSRTQHAALPPQPQCAFLRALRRAP

SEQ ID NO: 4423 - protein, 66 aa, Homo sapiens
LTRLLLHVIYFSSFPPVETLLLERELQHGTETGRKKQRGLGDAPTEQPLAHSSSRGHEHQAGGQER

SEQ ID NO: 4424 - protein, 16 aa, Homo sapiens
MHYLLFLMIFSLFHHD

SEQ ID NO: 4425 - protein, 20 aa, Homo sapiens
VVADLGLVGILLLLGGSRSP

SEQ ID NO: 4426 - protein, 54 aa, Homo sapiens
LDSKMMATLAPILWAPGFAHQISSPLALHLLLYLQGLPDSHLPIIMDTAPGCAG

SEQ ID NO: 4427 - protein, 49 aa, Homo sapiens
LMKTWTIEWSRNSPLSLTITVAFLWSSSSPRIPKTAAEFIKIKFVNVTT

SEQ ID NO: 4428 - protein, 24 aa, Homo sapiens
LWFLVLMRPLLRICAYLVPLLSTS

SEQ ID NO: 4429 - protein, 71 aa, Homo sapiens
MSSLFLSPPNQSYTARFLKQSQLQSLISPLLLLLLSSLLLICIFSLVKLPSLCSLFSVFSLERYSCKSELI

SEQ ID NO: 4430 - protein, 53 aa, Homo sapiens
LNTLVLSFIHGGSPPPTWGAEGNLPSQFTYQKFLCRNMIVPSVGHHLWSSLSF

SEQ ID NO: 4431 - protein, 37 aa, Homo sapiens
MHFLLSVTCGQLATSTVLDTFKLPRGEDRKLGHPVWD

SEQ ID NO: 4432 - protein, 58 aa, Homo sapiens
MHPPLSPPLPPGRILSGVFSTLSLLPVHSWVPLQHCHISLLMHLFPPCHSTWSLEQEA

SEQ ID NO: 4433 - protein, 16 aa, Homo sapiens
LIIFWHFILILGVKMV

SEQ ID NO: 4434 - protein, 168 aa, Homo sapiens
LTFSSSLPLQTLLPLCESQPCMPTPVEPGDRSCEPLALSWTGWACDAISPVSSPPPKGLPSWGGGTVGPVLSCFYRKSCSRECEVVQVGAEALMASCFLPTTWPVPTQPLRWHIWRAGVEGPPPHMPFWGEALWLPHSPWMGVAPLSPNHSIHPIQETNMVAILHKKR

SEQ ID NO: 4435 - protein, 41 aa, Homo sapiens
VEALWCPLLPGALPASLPITMPQPQPGPLQCLGLFQSSRAI

SEQ ID NO: 4436 - protein, 67 aa, Homo sapiens
LDFTLHFSLELFLVINFLGGTGTRGPAARPRIAAAGQRGLGRAPRRSGAAQAERTLKVFSKLFEESD

SEQ ID NO: 4437 - protein, 41 aa, Homo sapiens
MRLVSPGFWWVLPLRLGEALPGRRRQQPPGAMKTLRLREVK

SEQ ID NO: 4438 - protein, 35 aa, Homo sapiens
MTLFIASPNSVLTTVLLQMGQQVRGSQADFQHHRE

SEQ ID NO: 4439 - protein, 68 aa, Homo sapiens
LALLLASSVLWQVTSSPQVSRFPHLLPLQTSARTLHATVSGTELTGSRGCSTSGNLLQHFTDCKRGTC

SEQ ID NO: 4440 - protein, 27 aa, Homo sapiens
LPAFFCFKILSMTSLFRPASTIQLPTI

SEQ ID NO: 4441 - protein, 24 aa, Homo sapiens
LLWRQMNWILIVTLLFSPCVTLEP

SEQ ID NO: 4442 - protein, 43 aa, Homo sapiens
MRLHLPRPKRVMAAGYLGGASCWTMPHCQETGAGRFSDKISLS

SEQ ID NO: 4443 - protein, 13 aa, Homo sapiens
LLWFLWTGLLTLP

SEQ ID NO: 4444 - protein, 57 aa, Homo sapiens
MHMWLWSFCGGNLLQFRLSGQANPNSFRTGSQRLLTERHMPPHGPMGMLIFSVHIGT

SEQ ID NO: 4445 - protein, 47 aa, Homo sapiens
LFLQKKMAEFRLDRGEMLRVRLGVVICCLPPVICANSQATNNFSYAL

SEQ ID NO: 4446 - protein, 62 aa, Homo sapiens [sequence omitted]

SEQ ID NO: 4447 - protein, 43 aa, Homo sapiens
LKRLGLSLLVHASSASGQQVYKGGKRLLLDFFFSFFYKSKLPP

SEQ ID NO: 4448 - protein, 30 aa, Homo sapiens
MTSHWPAQTCLCLSFLSSKLHKTAYIRGWL

SEQ ID NO: 4449 - protein, 35 aa, Homo sapiens
MTSHWPAQTCLCLSFLSSVSTGYVSHCQIPDHKSP

SEQ ID NO: 4450 - protein, 75 aa, Homo sapiens
VSPTLSPLTPFLHLMMQLTLASPLQPAVLPTSRDVCVCVCVCDCVCLLTVVFVATCLWMVLCLLVNCGLAFPGRG

SEQ ID NO: 4451 - protein, 60 aa, Homo sapiens
MVRLRDAALPCPALSAPAPLKFSIQWRALAGWPSGRAVPGCSLTLANLDLRLTCCGSGRG

SEQ ID NO: 4452 - protein, 58 aa, Homo sapiens
VQKWHLERGRKRRKNRSSASDLRWLKERMYLVSAISLHPSMTLLSMSLIFLARKPSAV

SEQ ID NO: 4453 - protein, 102 aa, Homo sapiens
LLTSVLFGRAPSTHLWIHLGALGTMGWWNGCSEILEEWCPHFADTPATLTALPIVLPTYLLPQSLAGEGRWPGAISLQRRGSCFDYHLHLTGQALTLPFIQV

SEQ ID NO: 4454 - protein, 35 aa, Homo sapiens
RSSLIVPGAVTTVGPSAQSAQPLSVLPNPHNRPRL

SEQ ID NO: 4455 - protein, 23 aa, Homo sapiens
ILRTGIFVSALLMYPQQPELPDI

SEQ ID NO: 4456 - protein, 65 aa, Homo sapiens
IEKMEQDAHYCLVLLPLSRLAVGLMPVRRSRLAAKLSWSQAVTLDLGSHWPSICIQKASLCLLAA

SEQ ID NO: 4457 - protein, 9 aa, Homo sapiens
LLFLYFVLF

SEQ ID NO: 4458 - protein, 45 aa, Homo sapiens
KGLQGDGLGGRRFLFLLPFCLCSPNVPVSPLPHLGPLFGPCGQSC

SEQ ID NO: 4459 - protein, 49 aa, Homo sapiens
VFPALAAGASQESGRWALVLSVASEAGAAVAAPFWCSDTAEEPGPGTAG

SEQ ID NO: 4460 - protein, 91 aa, Homo sapiens
KTSLCFILFDFSSLWVIAPSLFNGSLPASILVLWERPAFWCCSQEWSLTALWKPHRRKTLICPRSCLTPPLDRPSPRFYTVLPARRHDEAM

SEQ ID NO: 4461 - protein, 37 aa, Homo sapiens
KFFLLASGCLCGFILLGGCSAEELTAERVWKPPTVAA

SEQ ID NO: 4462 - protein, 23 aa, Homo sapiens
LAVSVACVALAPRSSISGADVWA

SEQ ID NO: 4463 - protein, 99 aa, Homo sapiens
TRRTSRTSTAPAARAMALAAGAAWATTWPRRTTGTGTCCWTRPGRSSSARPSRHGATPTCGRQAHRSRTLMRTSETGSSSCCSWRSYQGSGYLSRSGGR

SEQ ID NO: 4464 - protein, 12 aa, Homo sapiens
LITLIFIKHVFI

SEQ ID NO: 4465 - protein, 9 aa, Homo sapiens
LLAAVFAVF

SEQ ID NO: 4466 - protein, 43 aa, Homo sapiens
LLYSALSARAAAASASALRCAPGPCCHGLPPAKPAEASEPLRR

SEQ ID NO: 4467 - protein, 6 aa, Homo sapiens
LFGILL

SEQ ID NO: 4468 - protein, 70 aa, Homo sapiens
KTKMTERTLAKIFQLHCLTLFYFSDTSPTLIEPVACNLVSQLCLFFLMYLFQTFLPLSTCIIRLEMGMRV

SEQ ID NO: 4469 - protein, 10 aa, Homo sapiens
LLYFVNIFFF

SEQ ID NO: 4470 - protein, 8 aa, Homo sapiens
ILFLVGLT

SEQ ID NO: 4471 - protein, 50 aa, Homo sapiens
MKMCVSLSAQCPERQSAAVWASSPSSSPWAATASSSSSPHPTISVPSTTS

SEQ ID NO: 4472 - protein, 15 aa, Homo sapiens
VVSVFLLFTLPESVL

SEQ ID NO: 4473 - protein, 52 aa, Homo sapiens
RPRSRGPWMCLDGKMARRHRRRHSSIALGKGLLCLWARPTATSLLFLTTRWW

SEQ ID NO: 4474 - protein, 64 aa, Homo sapiens
MGLGPGLLTGLLSGAVAGGALSPLPATRSTPTPPLPGQAGRRCWRGPRWRPGLGGARHEWAVAE

SEQ ID NO: 4475 - protein, 35 aa, Homo sapiens
LNRKRFRTWMRRFVAASGVWRGSGSVLRSWLPEAK

SEQ ID NO: 4476 - protein, 42 aa, Homo sapiens
LTRRKVPSPLATSLPALTAHAVILVTEKLFAWKVPACLPAGP

SEQ ID NO: 4477 - protein, 56 aa, Homo sapiens
RIWSLKICLTWYIRLLSQSQVTEHAFPTIYLQMHSILTLLELKRQIGEEDKINICK

SEQ ID NO: 4478 - protein, 52 aa, Homo sapiens
ILRWIPASSTTMCSEHVEEKKQLYLLVSFCLSSWTLTFSETQQSLQWSVGPP

SEQ ID NO: 4479 - protein, 29 aa, Homo sapiens
MKCSALFSFPCCPWGWRSTGLPGSGLQPP

SEQ ID NO: 4480 - protein, 62 aa, Homo sapiens
MSSCAVATLSGSASCPGLPVWRVTPPSPRDTSESRASASCWRVTTSMRCACLRTCWATARRT

SEQ ID NO: 4481 - protein, 97 aa, Homo sapiens
MLCKSSMSSWWKRGLRPSACSCCTAAWPRATSRAVSTTSPENCRHSSRAMAKPMPLLAPVTSATRLQDDMAERGARGTCVEGGPGFGPPGARPEEPS

SEQ ID NO: 4482 - protein, 29 aa, Homo sapiens
MRTSNNGLPWLPLLPHFSTLGILASPPQL

SEQ ID NO: 4483 - protein, 20 aa, Homo sapiens
MLIVLFFLLAVHFGGYYKEI

SEQ ID NO: 4484 - protein, 138 aa, Homo sapiens
LGFLHARVASCSTSLSLILVSTSSPGKFPFSRLALPTRASDFHPSFSLLASDYPPPIPPRPAAQLPPPFTRTGTIIPTPLRPVWDSTCLLPNPTLISAWSLPLWPNLSSRLIGDGHSHSLVPNTSSWMDSRHPCPLFN

SEQ ID NO: 4485 - protein, 48 aa, Homo sapiens
METANPTQETVFENRASATCMMWIGEMVCPPSHGMSLLCSGIFPSLGF

SEQ ID NO: 4486 - protein, 52 aa, Homo sapiens
LPLKRRQQTKSSSFFPMTSTVCAMVPVARARAVPVRTLKTSSPLPLTFSAVI

SEQ ID NO: 4487 - protein, 48 aa, Homo sapiens
VAAAAVVFSWCPAETAAAQGVAGPTQDLPGPSALRDKGPALAKADGQE

SEQ ID NO: 4488 - protein, 26 aa, Homo sapiens
LFYDSLVVFLSVFLSFLSPMPVACRK

SEQ ID NO: 4489 - protein, 23 aa, Homo sapiens
RQRDFFFLLVFFFPPSLFILKRI

SEQ ID NO: 4490 - protein, 26 aa, Homo sapiens
MPLPVLLCLTLPMPLPSATARGGNRT

SEQ ID NO: 4491 - protein, 30 aa, Homo sapiens
TNPSIKKRPLIRRRLLVSFLGTHSGFLQSR

SEQ ID NO: 4492 - protein, 19 aa, Homo sapiens
IGCIVAFTLFHLLDMDLSP

SEQ ID NO: 4493 - protein, 51 aa, Homo sapiens
IKPFGSCLKTFKHLMALQGLNIKAFVLKGLVYSLRNIVMSFNVLRVDQGLL

SEQ ID NO: 4494 - protein, 50 aa, Homo sapiens
LICSMNENGKFPGLPSAQLSCLPPFASAAHASLSSVFCAWTLWAHPGHGG

SEQ ID NO: 4495 - protein, 48 aa, Homo sapiens
VVLLLLSHGARCFLITWLPPRPLCSCLLFGCRRCCLWPPAFCCYPESC

SEQ ID NO: 4496 - protein, 16 aa, Homo sapiens
VGPLFLHLMIGWFSNW

SEQ ID NO: 4497 - protein, 42 aa, Homo sapiens
LKLLFKTRKRRRKRKKRKMLGNIYLTCSTARTLASCCYSCKY

SEQ ID NO: 4498 - protein, 14 aa, Homo sapiens
VGGFNFSFFLVIFF

SEQ ID NO: 4499 - protein, 10 aa, Homo sapiens
LYGLDLFLLF

SEQ ID NO: 4500 - protein, 62 aa, Homo sapiens
LKCLTTLMVCISSEALKKYQVGFDIAVVRATPPHLENWEMWILRDRAVHELQAVLLALVLGR

SEQ ID NO: 4501 - protein, 56 aa, Homo sapiens
MSKSVWTKMPKVLRLIFNTIKKKNLKKMELFLPTTMTVTGSSSRDWLASTIMHVLL

SEQ ID NO: 4502 - protein, 18 aa, Homo sapiens
VCAVLHLGLLLAAWPQRG

SEQ ID NO: 4503 - protein, 17 aa, Homo sapiens
KNSMTWITICFPLFTSL

SEQ ID NO: 4504 - protein, 34 aa, Homo sapiens
TAPRWMFGQLAVSLLSCCQECLCGQENRMWISCI

SEQ ID NO: 4505 - protein, 29 aa, Homo sapiens
LLPSRRRSRSFSRIIPSFAGPLVSMALAH

SEQ ID NO: 4506 - protein, 27 aa, Homo sapiens
IQDFLFFATILTPLLHSFFSVKYVNNN

SEQ ID NO: 4507 - protein, 44 aa, Homo sapiens
IAPTLRSQRCWMGGCRWWTSPCPSVAATWASTPLASGAPTCTSS

SEQ ID NO: 4508 - protein, 14 aa, Homo sapiens
IVLVFLPKITAGLL

SEQ ID NO: 4509 - protein, 46 aa, Homo sapiens
MRWHRCSSWGRCSCAHAHAAAPPKMAKSTSTCQAGADPPAAWTFDF

SEQ ID NO: 4510 - protein, 35 aa, Homo sapiens
KPEMPRAGLIGPSGGFSVPQAAVAISGADWLVPWP

SEQ ID NO: 4511 - protein, 109 aa, Homo sapiens
MTQAGQSSGCTALWFPSMLFSLSLLSNLNQIGSSHLDRPHIPGQSAQLFIYQMSSQQLQQQPSANKKAGKIHNTPFANQLNPTQHLAKPFQQILPGRQSGSLTSPFLAC

SEQ ID NO: 4512 - protein, 109 aa, Homo sapiens
MLAVPVTCGDTARSALQPDLLARRRLKRCPSRWLCLSAAWSFVQVFSEPDGFTVIFSGLGNNAGGTMHWNDTRPAHFRILKVVLREAVAECLMDSYSLDVHGGRRTAAG

SEQ ID NO: 4513 - protein, 23 aa, Homo sapiens
LMMSLFIARLYMMLCKTWIRRLM

SEQ ID NO: 4514 - protein, 43 aa, Homo sapiens
LRGSLSGPVEDAALRQVLALLPGAAPGPAAGAGAQLLGVPAHA

SEQ ID NO: 4515 - protein, 19 aa, Homo sapiens
MLFCTILICYSSQLIGMME

SEQ ID NO: 4516 - protein, 30 aa, Homo sapiens
VLHLSFFLLAKVPFATMGMYQVRPSRGNEW

SEQ ID NO: 4517 - protein, 97 aa, Homo sapiens
LFFLLQHSPSSAYPHPQRLPSPAVLPLVAASPSPGPLHFQLLPPKFVLVSPFPALPIRSLFHLQLFFPASLFPPPMVSPWLLSTPLASSLVFPWPWH

SEQ ID NO: 4518 - protein, 122 aa, Homo sapiens
LPPATSTPPCSCPFLLLPFLLLSSLSSPPSSSLLLFPLLLSSPPLSSPPLLSASPCFSNTSLLSMFSLHVVPTLRTGGRRGWLSAWHLVSTQHMPAAAGTALISKSLLRVRCVPGALARGAW

SEQ ID NO: 4519 - protein, 35 aa, Homo sapiens
VLFVLGFAAGTIWQALSYVYHGFCHVDIMAGLPHC

SEQ ID NO: 4520 - protein, 19 aa, Homo sapiens
LLSALVLLLVLQKRQKNKR

SEQ ID NO: 4521 - protein, 42 aa, Homo sapiens
MLLIIFPLLLVLVLRVRTRVVGRGCFLTGLFIGTMYYLSNTM

SEQ ID NO: 4522 - protein, 28 aa, Homo sapiens
VVGLLAALTLNLSVRGEGICRCGFWSCS

SEQ ID NO: 4523 - protein, 109 aa, Homo sapiens
LAPPPPAPLLGPPPAGRLPRSTYLWCPALWPLSSRPRAPSARPVQPGLPGSRRPPRADRVPMDRRTDTCRSDTADPVTWRIVFIPHLRICPNWSAGPIAMGLFAASFQT

SEQ ID NO: 4524 - protein, 47 aa, Homo sapiens
LDFIRAFLLLLVASVPGKIGSQNLTAQRPPVATSFLQMESSEPTVRK

SEQ ID NO: 4525 - protein, 17 aa, Homo sapiens
MGSSSSFYSCCFLMAMA

SEQ ID NO: 4526 - protein, 12 aa, Homo sapiens
LHVLVALITVMI

SEQ ID NO: 4527 - protein, 101 aa, Homo sapiens
LIDGVRGRRQMTAFGLGIPTFLVMQPSGSQPRFPALTQNGVALVRTPLTSVYLRVRPILPAGLCLGVTLPELAPTTVATVMLMCDCCQEPAHMTVWRKFFP

SEQ ID NO: 4528 - protein, 87 aa, Homo sapiens
LATRPWAKSRRGYTWGLDVPSRLWWALSPGFLAACCACGSLGTVGLCVCPCVCMCVCMFLSPLDSCTKWLMGTISRQIVKIDRKSFS

SEQ ID NO: 4529 - protein, 22 aa, Homo sapiens
LRPGLLTFCPPLSAGSAWSKRC

SEQ ID NO: 4530 - protein, 44 aa, Homo sapiens
MFVVLISVFVPSRSVMPCAASVDGVMYNELHESLQGCLQHVFSK

SEQ ID NO: 4531 - protein, 50 aa, Homo sapiens [sequence omitted]

SEQ ID NO: 4532 - protein, 49 aa, Homo sapiens
LQAGKMRRFFFFVSMMIFAATWLWRAADTPSYSRGCFLEADSVCSLVEL

SEQ ID NO: 4533 - protein, 39 aa, Homo sapiens
LALPASIVMLVLPVHRLLAAETTNFLQTRRCWWLLHSSG

SEQ ID NO: 4534 - protein, 36 aa, Homo sapiens
MPSRKLMLLGPSQADLGTSHALLSSTRPLHSILEED

SEQ ID NO: 4535 - protein, 32 aa, Homo sapiens
IWSSKSTRPLLLTVRSILAATSLTCSWTPHVL

SEQ ID NO: 4536 - protein, 24 aa, Homo sapiens
IHVIFLLLVSSAANISLRGNITGK

SEQ ID NO: 4537 - protein, 40 aa, Homo sapiens
LYAKELVLGAPWFRRQPPASSSFCCCSWGLCLLPTPALCP

SEQ ID NO: 4538 - protein, 57 aa, Homo sapiens
LRPCWKLPIKKKRMSNKGKKLKRIILAIPPAAPATVAMRPVEAAPSGRQATITKPSL

SEQ ID NO: 4539 - protein, 26 aa, Homo sapiens
LPRLRKSLVLGGGGAAVAVMATGLGG

SEQ ID NO: 4540 - protein, 92 aa, Homo sapiens
VCVLGVCVLGVCRGAERRAGPRGRKEAVELPGLGLRLPSSALLPVRSDAAAAVALSAPRWGRGAQAGSSENPLRRLPVPAGLRMPGRLICTY

SEQ ID NO: 4541 - protein, 41 aa, Homo sapiens
RSFFSALVRFLFGFLPASGATRVARQQPLGDLVLGSCPAWG

SEQ ID NO: 4542 - protein, 56 aa, Homo sapiens
LVVTAGGAGPGAQRGGLWRSEGRRCFVAWTLVSALEQAGAWSAAGPPWSPRWARAS

SEQ ID NO: 4543 - protein, 38 aa, Homo sapiens
LLMLPCGTCHGAGTAALSRPAVVAAAAAAAGPERRSCH

SEQ ID NO: 4544 - protein, 72 aa, Homo sapiens
KEINIFKLDVSTVLLFCLESGTRGASACAAGAAGNSGCFSLSLSFLGAHFCCFDSRAYQVRSEGGRRQCPFC

SEQ ID NO: 4545 - protein, 35 aa, Homo sapiens
IRVNLISRQLNTFFLAVLLVVCMPCFHSVCTGKRT

SEQ ID NO: 4546 - protein, 44 aa, Homo sapiens
KPRDTCWRADGICLAWAGVLALLLLSCRATSDDRLFPLSLSFSS

SEQ ID NO: 4547 - protein, 81 aa, Homo sapiens
IQHPSRHSAVSCLGVAAAMARKALPPTHLGQSWFCSCCRDTELAISALRARTATGSPGSCRCTAGPLPCASALESCCCRVT

SEQ ID NO: 4548 - protein, 55 aa, Homo sapiens
LPMNLLCIAPMFYSALMTSGRKMCCAMSPSLWRDSGSALTGPCWRHAAVTSTQES

SEQ ID NO: 4549 - protein, 55 aa, Homo sapiens
INWLLGWMFSTSFLAANFSPIVFLLQQGEKVLCGPRRAVKLRVRGSVRGRMCVRV

SEQ ID NO: 4550 - protein, 66 aa, Homo sapiens
MPPTVRRGCWARPGWSLGLAGAAQNCLLRKRCSPGPPLSPGLRRTRRLPDQRVPEEDSVATGFSRV

SEQ ID NO: 4551 - protein, 55 aa, Homo sapiens
LLLFSSFVFFFSLETGSSYVGQAGLESPGSSDPPASASGKVGLQARIAAPGQSLF

SEQ ID NO: 4552 - protein, 84 aa, Homo sapiens
MQLLFLVFVLFLFLFLIFIFLETGPCSVAWAGEQWHHHSSLQPQTPGLKRSSPLSLLSSWDYRCAPPHPAKTAILPLRVIRKIH

SEQ ID NO: 4553 - protein, 25 aa, Homo sapiens
MLKRKHVFSSSCIFMWSCSLPNVED

SEQ ID NO: 4554 - protein, 88 aa, Homo sapiens [sequence omitted]

SEQ ID NO: 4555 - protein, 28 aa, Homo sapiens
MRKRWMALSAAVIAASARELSIAAAPEA

SEQ ID NO: 4556 - protein, 18 aa, Homo sapiens
ILWTWAWLECSGVLKILL

SEQ ID NO: 4557 - protein, 74 aa, Homo sapiens
VLPKPLLPLWMLSLTLTHHCASLQTPRAQDWARPRDSHPFPSWEELACLATDSVSSNWLKWALPRVQLCGFYHA

SEQ ID NO: 4558 - protein, 131 aa, Homo sapiens
LAPDVCSFTGCLICLLHPTGPPTSSDVFLIMSAMCPILLHALPPFPTTAEWPGTCLKCLFPISLRDQEGILGMPLTSLLSRQQKWRGSQESALNCPPGWQGSLNRYLELGSGLFPCVLTTRASCSRAGIRG

SEQ ID NO: 4559 - protein, 52 aa, Homo sapiens
MSSLFNIFFPMPSLWIPTAGFCLLHAENKITYSLLMQSEAPEEQRAQLPEPH

SEQ ID NO: 4560 - protein, 74 aa, Homo sapiens
LTTSPSAPVSCGLVSSRLSWPHRSPIRAFPVLCPGSGSAIFGLSELVCYSVVAESTEAVFASLFLAVERFPPGG

SEQ ID NO: 4561 - protein, 16 aa, Homo sapiens
VNMRLGLQKLLYGILF

SEQ ID NO: 4562 - protein, 81 aa, Homo sapiens
LYFALINMLASLSGFLMTTTSKHAAYCLKGSCLTQARVQWPLKLTTASNFWAQVILSLPVVFVDCLMESHGTRRLKQCLQF

SEQ ID NO: 4563 - protein, 57 aa, Homo sapiens
LYLISLGMVLGADAVWLWIAPYGQLCPQGRMRIATEVLKSKPNSSHWHTGIRQKAGS

SEQ ID NO: 4564 - protein, 40 aa, Homo sapiens
VLAVAAAAVARRPGTESESTVASAAAAAAAAVATAAGTRS

SEQ ID NO: 4565 - protein, 40 aa, Homo sapiens
LKVTRLLLPIFRLLLAEAERLTLHNMAAWCVWCPRADESR

SEQ ID NO: 4566 - protein, 67 aa, Homo sapiens
LRPRSAAFAPRYTRLVMRRSSRSFRLQCTGFPSSSAQSISAHLSNSMPSSLLTISRCPGMFAVRCPL

SEQ ID NO: 4567 - protein, 124 aa, Homo sapiens
LLVPLPSAAPSLVRDFPVALDLRIYSSTPSAPHYPESHRVSVVSPVDVAGVSWYCGGTQVVHAWDSGGRREGQLRVDVKPPFLFWTQPGLHCNLHQDQDPGPQAGMVLPRKGHFRRSPAWAIQS

SEQ ID NO: 4568 - protein, 51 aa, Homo sapiens
MEVASVAAYCAGCSSLCSAARCRIRCPLWLFCWLEDRPGAATPPLGKAETL

SEQ ID NO: 4569 - protein, 9 aa, Homo sapiens
MSCGLVLLW

SEQ ID NO: 4570 - protein, 22 aa, Homo sapiens
LRTLAAPRRALFFRLGMLLTAG

SEQ ID NO: 4571 - protein, 124 aa, Homo sapiens
LSLCKVWAFLFLFFKGNEMEFEGTFSLTPLLCVLHGACPRASANSSISSHSVLGTIPGLCWRDETAVEMKTGCRGWHSLAGFSPSGDSPTPRTLHTSSSHRSHLLFFFFSETTDHSDFSFPLFN

SEQ ID NO: 4572 - protein, 55 aa, Homo sapiens
VVALRPRQRATGLPVAPGFLCAAVCLLSCRPLSSAKRPCPTWPLGPVTFPSCPGK

SEQ ID NO: 4573 - protein, 39 aa, Homo sapiens
MKCGSILYVSTPTFSLPLSGTAEPGLAQQISLSTHLLQV

SEQ ID NO: 4574 - protein, 41 aa, Homo sapiens
VSPGGAWLGRRALSAAPILQILAEAFVMSAAAETGVLKAGC

SEQ ID NO: 4575 - protein, 44 aa, Homo sapiens
LRSKLSATSWTLGTLLRTMAFNSQTRTFRITKETGSFHILILVM

SEQ ID NO: 4576 - protein, 49 aa, Homo sapiens
VSLLIVLLSLPRSRFSIRLLGIRLFTRPHSRPTRALVAPWVCFILKRSG

SEQ ID NO: 4577 - protein, 83 aa, Homo sapiens
LSLTCLLLVHLSIAHLHHARINALLCNHTHPASRSIHPRASNITRIHQDHETTRSSGSSYSQDSIIFPSAVVGGCIFPNLCLA

SEQ ID NO: 4578 - protein, 27 aa, Homo sapiens
KSVFHGVCLHLLTSQVLKQKTKAMILM

SEQ ID NO: 4579 - protein, 15 aa, Homo sapiens
RKFPRGPPRWLLCLM

SEQ ID NO: 4580 - protein, 9 aa, Homo sapiens
KWMVCLFAV

SEQ ID NO: 4581 - protein, 20 aa, Homo sapiens
IEVLLFFLMPWLCEFESKQL

SEQ ID NO: 4582 - protein, 18 aa, Homo sapiens
LLLLFTLLLGFYEGFVKS

SEQ ID NO: 4583 - protein, 39 aa, Homo sapiens
LMLKMYHLSFQHLTTTSSVSTGISSSLYLSYRPKCHLSL

SEQ ID NO: 4584 - protein, 14 aa, Homo sapiens
ILGALWTLVIINQE

SEQ ID NO: 4585 - protein, 65 aa, Homo sapiens
VFLQKFPPWAVVEVVTVIVAAPAAATATTRDGGGCSRNCNIPEVFPELLGCPNRRGPPGGVRGAD

SEQ ID NO: 4586 - protein, 40 aa, Homo sapiens
IPPIPANMTAAVSLTRSPAISASCAASRSASPWAWPWTWF

SEQ ID NO: 4587 - protein, 20 aa, Homo sapiens
VDWLGALVHVACVVQLLSTL

SEQ ID NO: 4588 - protein, 90 aa, Homo sapiens
ILLPGDPLSSHLLLLPLLLHRARARTPPGCRSRTAPARTTRRCRCCGTRRSRWPCPWCTRWWRRSASRATSSLCGCCAGAWGPDPRRSSS

SEQ ID NO: 4589 - protein, 73 aa, Homo sapiens
VASVSVVSFLCLAPHGFKSTRAGVETAHLALILSDWWFWPVSRYLSIGKAALRCGGHPDSHRLHSRNGSMRLY

SEQ ID NO: 4590 - protein, 31 aa, Homo sapiens
MGSWVHNLCIICTFMYLGAGSSSGLQVEPAN

SEQ ID NO: 4591 - protein, 83 aa, Homo sapiens [sequence omitted]

SEQ ID NO: 4592 - protein, 34 aa, Homo sapiens
RSGPTAPSLLKVMQMKSFCLIFHLRAMSSSKASL

SEQ ID NO: 4593 - protein, 31 aa, Homo sapiens
RLPSFVVSQRCAGLLLAALRIQGVGCQVQVS

SEQ ID NO: 4594 - protein, 28 aa, Homo sapiens
LGFRGLLFLVLLLSSLFPVWPWLTLKTL

SEQ ID NO: 4595 - protein, 13 aa, Homo sapiens
IVLFLLLLIFSTE

SEQ ID NO: 4596 - protein, 45 aa, Homo sapiens
IVLLLLQLMGMTARNLNEIDLPVRLPVFSIFEKFHVMSPKQRSYH

SEQ ID NO: 4597 - protein, 18 aa, Homo sapiens
LGCWNAWALLASSLAGLH

SEQ ID NO: 4598 - protein, 22 aa, Homo sapiens
LDLSLIFWSLASCIFLEPQLNS

SEQ ID NO: 4599 - protein, 45 aa, Homo sapiens
MMTFMMGLKRKMLMMVSLLLLNNWTWEMKFTMMWIPLISLFHQQR

SEQ ID NO: 4600 - protein, 24 aa, Homo sapiens
LTPSLMFFIMILMQGIQMIMDRII

SEQ ID NO: 4601 - protein, 35 aa, Homo sapiens
VESPAPAAAAAAVAVVVAAAAAGERARAGKPQSEI

SEQ ID NO: 4602 - protein, 30 aa, Homo sapiens
ITVEDMVLLMVWVVMAVVVEAVEVTMGKAA

SEQ ID NO: 4603 - protein, 35 aa, Homo sapiens
LCFLIFPSALFWGGGYSSFGITFPPPMCFPSFEIF

SEQ ID NO: 4604 - protein, 86 aa, Homo sapiens
LREPNISTAPRTFLSPSTATLMNGRYGRAALTQFCTLTCGGGQTSCWWLLLMPTLWGRWPVASVTTCLPASCGPGTAASPCSSARP

SEQ ID NO: 4605 - protein, 40 aa, Homo sapiens
RSSVSQEMIAPPALGFWPRRWRLWLAVTLAFQARPGEATR

SEQ ID NO: 4606 - protein, 63 aa, Homo sapiens
RRPLLCPVTFPSPGTAPRPSPASPCPSCHGSRKLWGPLGWTPWKSARSTLGPAGPPLYPSKTA

SEQ ID NO: 4607 - protein, 33 aa, Homo sapiens
RKLAHLGRSVLLGFSLEHSLDLISSERVMGQHG

SEQ ID NO: 4608 - protein, 46 aa, Homo sapiens
LCPKLIYTSGSSSLLKTNAQMLFTDIYILVSLSCPTLLLFPIPNSS

SEQ ID NO: 4609 - protein, 23 aa, Homo sapiens
VGMRFAGLVAAAAAGGPAHVKPA

SEQ ID NO: 4610 - protein, 13 aa, Homo sapiens
ILALSSIIFGCCI

SEQ ID NO: 4611 - protein, 26 aa, Homo sapiens
MAHLSGQPCASCCWLWQCLSSAQLYP

SEQ ID NO: 4612 - protein, 74 aa, Homo sapiens
MLASLSGFLMTTTSKHAAYCLKGSCLTQARVQWPLKLTTASNFWAQVILSLPVVFVDCLMESHGTRRLKQCLQF

SEQ ID NO: 4613 - protein, 98 aa, Homo sapiens
MRGCPRTSMWLGPLRSWLVPSSSTPFSLGPMGTCTAWCEAATVSLSLRLPCSSARWPPPWRTVTSTVWSCVISSCVALSSLTVRGRSWCWRTWRTPAC

SEQ ID NO: 4614 - protein, 59 aa, Homo sapiens
MTAFGLGIPTFLVMQPSGSQPRFPALTQNGVALVRTPLTSVYLRVREPAHMTVWRKFFP

SEQ ID NO: 4615 - protein, 58 aa, Homo sapiens
MTAFGLGIPTFLVMQPSGSQPRFPALTQNGVALVRTPLTSVYLRVRICRVLGPRSQPS

SEQ ID NO: 4616 - protein, 91 aa, Homo sapiens
MTAFGLGIPTFLVMQPSGSQPRFPALTQNGVALVRTPLTSVYLRVRPILPAGLCLGVTLPELAPTTVATVMLMCDCCQEPAHMTVWRKFFP

SEQ ID NO: 4617 - protein, 45 aa, Homo sapiens
VLFFSLFCLCISSNCLFKMPRIWTPSTSNRHWEGEGRKAECKMKW

SEQ ID NO: 4618 - protein, 40 aa, Homo sapiens
ILRVYAPMIGLVSKTNAIISLKKKEIGIQVNTTVPLNMPT

SEQ ID NO: 4619 - protein, 66 aa, Homo sapiens
LGLAAGSSCLFLHCFAPFVLRSNSAVRAGPPARPQPPRSHQLQLQLRSLRLPQSPAALSEAWSYFL

SEQ ID NO: 4620 - protein, 82 aa, Homo sapiens
VPPHPRRRVHSLLAAGPAAAAAAAAEGMSPGRARRLPQATARRGTPSRAHRSTARTPAPCGTRLRSLEAVSVIRMHWAPRSW

SEQ ID NO: 4621 - protein, 24 aa, Homo sapiens
MAAAASATASAAKVSADGSRHLTA

SEQ ID NO: 4622 - protein, 49 aa, Homo sapiens
VAATSALLAPPFAAHAPSRGVSWPPPAELGSQQSPGHPPPAVRSPLVPG

SEQ ID NO: 4623 - protein, 60 aa, Homo sapiens
MHVGIGISQFSRARACTMFHLLGFVTYLLVCLGDSGVGRGESSSPINKLILYLPDSQLPC

SEQ ID NO: 4624 - protein, 46 aa, Homo sapiens
LGRDAGGDGARRACCWRVMALQGCGLRPHRESTARGSPKSEVLGER

SEQ ID NO: 4625 - protein, 95 aa, Homo sapiens
LIAAAVFPFFFCRRLLCLFSSFLALLLCSVTSPNPLPTQPAPFFFCLRCSISPSAAAATAAHSWCRCRAFTPKSFPQPMAQAALGISAQGNHIPL

SEQ ID NO: 4626 - protein, 28 aa, Homo sapiens
LELFRRSSLQSLLLLYSVGPGGAELSGA

SEQ ID NO: 4627 - protein, 69 aa, Homo sapiens
LRPSCVSPLRKAAEDLGGRQYPEDCGTLSAVPCSRLRRTRVGVNTLKIAALLPQSLALGCGGPGWASIP

SEQ ID NO: 4628 - protein, 125 aa, Homo sapiens
VTTKAVLLALLMAGLALQPGTALLCYSCKAQVSNEDCLQVENCTQLGEQCWTARIRAVGLLTVISKGCSLNCVDDSQDYYVGKKNITCCDTDLCNASGAHALQPAAAILALLPALGLLLWGPGQL

SEQ ID NO: 4629 - protein, 37 aa, Homo sapiens
MWQNLNGDISSLWVSSLLAFNQLFCLTAAGLGTAQPP

SEQ ID NO: 4630 - protein, 81 aa, Homo sapiens
MFTMGFLKTVLLGTSACVSPPTMPAFFSLPAERRLQAWPQSEAPLSVSSCFQNRPPEPASFQNLRPEPASLQNLRTEPTSF

SEQ ID NO: 4631 - protein, 17 aa, Homo sapiens
MKLAPSLIWTHLWSLWL

SEQ ID NO: 4632 - protein, 40 aa, Homo sapiens
MLKLFLSHFCLNLIQTSNVLLWNGVGKMQAISNNKSVLKF

SEQ ID NO: 4633 - protein, 38 aa, Homo sapiens
VRNKSPKFPKSPWAGGHCLLFLLHRVVLSPQPARQTLP

SEQ ID NO: 4634 - protein, 30 aa, Homo sapiens
LGAGVLLSSGAARNGGSHLASAAGMDQTAS

SEQ ID NO: 4635 - protein, 37 aa, Homo sapiens
MGVPGAIISLPGALIPCIVSLVKSEQPGRALVQTWAE

SEQ ID NO: 4636 - protein, 9 aa, Homo sapiens
LDFWMLVYF

SEQ ID NO: 4637 - protein, 32 aa, Homo sapiens
MSWGFGSTARRPRACTSLAVSSPSASGAFSVE

SEQ ID NO: 4638 - protein, 31 aa, Homo sapiens
VFGLLAAFFPLSHTLVYYFEVVFAEFERREN

SEQ ID NO: 4639 - protein, 26 aa, Homo sapiens
MVAPSFYLLAGALFQRPRWSLACTPC

SEQ ID NO: 4640 - protein, 56 aa, Homo sapiens
MGHFFLVTEAVVLIFRRRCISSRFCYIFGIKYGLRCLRFSGINFLLLNAFFLLLEM

SEQ ID NO: 4641 - protein, 34 aa, Homo sapiens
MWSEFQKLASFSLPLILTIPQEFCIQGPKVCYPR

SEQ ID NO: 4642 - protein, 58 aa, Homo sapiens
MLRCPPKWIASYLVPACCRLLHLVPLGTHCAANSSRQIHWEAVAHEGISETFFCDLAV

SEQ ID NO: 4643 - protein, 33 aa, Homo sapiens
MLLWLLMLGRSASFCSVADKLQWTLAQRTGPHP

SEQ ID NO: 4644 - protein, 74 aa, Homo sapiens
MSQDYCNWKSVLLCCCIPCLILKPETRKAVACLFTSCVLFKKYLLSQDNTNKVDLRIGVPGLEPCWYHLLTACF

SEQ ID NO: 4645 - protein, 68 aa, Homo sapiens
MSQDYCNWKSVLLCCCIPCLILKPETRKAVACLFTSCVLFKKYLLSQASGIFLDICSSCFLTACFFSE

SEQ ID NO: 4646 - protein, 49 aa, Homo sapiens
RLSLMGAFLLATSLKWNLLVALLPLQLWCYTEKLEVSKQTREKEKHQKV

SEQ ID NO: 4647 - protein, 44 aa, Homo sapiens
LVSLCFGSLWPVLSRLLASRPAARPRGSSWPPRRPARARRPRAG

SEQ ID NO: 4648 - protein, 72 aa, Homo sapiens
LAFRALVLLDLLGLLDLLASLVRLESEAPRGTLDQMDHRGPQDPLGNLVAREPSRVWKAVRISCVQPTVHPE

SEQ ID NO: 4649 - protein, 53 aa, Homo sapiens
LASLVGSSSWPRQTGGGSGPDCGAMAVVSSFAAAASLAESPASALGAPTASAG

SEQ ID NO: 4650 - protein, 44 aa, Homo sapiens; identical to SEQ ID NO: 4647

SEQ ID NO: 4651 - protein, 52 aa, Homo sapiens
VVSALRSLGCSLLGFSCVAEEGEEKSSRQAQPSPARSPDGAAAGAARALTEP

SEQ ID NO: 4652 - protein, 103 aa, Homo sapiens
IGFHLARTFYVALLLWPMCCILCPQCATGPQRNVCLSNHGSGAVWQECKSGWRPGSPPGALHPPSRRTQQHDALRRSHCVQAPHLPGTALLRVPPSRNEGVHP

SEQ ID NO: 4653 - protein, 125 aa, Homo sapiens
VGCPASGLLLLLVLLRRPAASPSRAGGESGCGFVLTVIVAFPRLGGLRAGLLLLRERAVLSDPTPSRGSPHTLGCVRVEWDPRTRVSLDSYGAERTKIPDGKLNEWQKPWWSRRKSPKRSNFGYY

SEQ ID NO: 4654 - protein, 21 aa, Homo sapiens
MHTSGRGWGTTCLLVLLASDE

SEQ ID NO: 4655 - protein, 139 aa, Homo sapiens
LTAAAGLRLSALGSAASAPLHSTSAPSDSLPSASTPPAPVRIVSQLLATRPVPGCFSISRPPLLEYFTPCIWGQGLEKGRVERPVEKKEARPAGGGGSADCGEETPRHPFWSSPLPPRPCAHSLAGELLSDQESKSGPG

SEQ ID NO: 4656 - protein, 53 aa, Homo sapiens
LGHTGARCRSPVLRHLVWNFRLAVSSRSGALCGVVWWKNGPCVGLTPSVCVSE

SEQ ID NO: 4657 - protein, 18 aa, Homo sapiens
MQRVFLCLFCTLVNYVPP

SEQ ID NO: 4658 - protein, 103 aa, Homo sapiens
LIFWWVYQLLVECPCDSFRCQLDRIEGCLDGWGSTVSEKDHVFGGDCFMSEFQGTHSDHGSGIIKRDTKACSLSLPCKTTTQRLPSANQKQVGFPQTPDLPAP

SEQ ID NO: 4659 - protein, 75 aa, Homo sapiens
RGPNKKREEMEITSPDLAFLSLFLFSPLPSDDWRVKGNPERGGEQRFEKMQECVWRRVKLPFKLWPPGTRCSAAG

SEQ ID NO: 4660 - protein, 31 aa, Homo sapiens
KAAAGEVVVLVSLSHPVPSSSLQRHTLSPPP

SEQ ID NO: 4661 - protein, 42 aa, Homo sapiens
LAVALVSTHLPATLVIVATAGLDCQTGFSFYLEAFSEGSRSI

SEQ ID NO: 4662 - protein, 20 aa, Homo sapiens
LYSVLGMHVILTQWLLLTNR

SEQ ID NO: 4663 - protein, 72 aa, Homo sapiens
LCCCFLISSTKIFLSGVYLIGSVLSSPPPPPPSLRCVCRCRCCRRRCCCCSPRRYTNPRLFVSPLGSVEFLC

SEQ ID NO: 4664 - protein, 44 aa, Homo sapiens
LSEGAFFLASMALRGAPAGGGAVRWSPAFPGDTGPSFEVESFWF

SEQ ID NO: 4665 - protein, 82 aa, Homo sapiens
ISLGPSLLLFLSLDARLLRTPSPGGPAACELTEGLRLGEWVSPRPCPCSRPWPGPWLSPLCAEIVSLCGYSGVETAGSVTAS

SEQ ID NO: 4666 - protein, 49 aa, Homo sapiens
ISLGPSLLLFLSLDARLLRTPSPGGPAALLPTLTSRRPWPPSQTGSYSC

SEQ ID NO: 4667 - protein, 106 aa, Homo sapiens
LGALSGLSLICRRSPGGLLGCLLLPAGAGPPPSLVIRGWTSWEKELSVVFGGRDSPLLLGKKPDLPASWHLSLLLAPLCLASACILSVLRPLGVPCWPGSCVLRTR

SEQ ID NO: 4668 - protein, 70 aa, Homo sapiens
LAAGPAAAAAAAAEGMSPGRARRLPQATARRGTPSRAHRSTARTPAPCGTRLRSLEAVSVIRMHWAPRSW

SEQ ID NO: 4669 - protein, 56 aa, Homo sapiens
VRGNRKWAAAAAGPLAETAAGAGPRDAGTGRGPPERGKDAGRRSGFKDATSCSAVS

SEQ ID NO: 4670 - protein, 13 aa, Homo sapiens
LRRGALFCSVLFF

SEQ ID NO: 4671 - protein, 59 aa, Homo sapiens
MKCFQDCLAPRGIIAEALDMNRSRQRMKLMVCMVTVLLPIFELLEYKLCLCLECPSQSD

SEQ ID NO: 4672 - protein, 88 aa, Homo sapiens
LAQVNSTSRRRPRPRVCILGWTSWGFGPSPVGGSRSAAWAQPTPRRRPWQAPWTWTRAARWRSCSAGASKPSMTPGRCGTRSWCACSS

SEQ ID NO: 4673 - protein, 32 aa, Homo sapiens
KMATSTFQFQCLVFMAIMTIPQGQMHFVPWTF

SEQ ID NO: 4674 - protein, 40 aa, Homo sapiens
MWMFPFLKWKVTSRAQKLTSRAQKWTLTHLMLMFMAQTGT

SEQ ID NO: 4675 - protein, 15 aa, Homo sapiens
ILMHLMWMFMVQTGI

SEQ ID NO: 4676 - protein, 32 aa, Homo sapiens
IFSFACIIRVSTPLLSFLATLLQSSTNYPCPG

SEQ ID NO: 4677 - protein, 47 aa, Homo sapiens
MSWWTEASGATCTTALTTVRSASSAPTTIWYVFTSSPACTPITSRPS

SEQ ID NO: 4678 - protein, 35 aa, Homo sapiens
LVRSSALGSFVSGSGLALCPRVFVPLRSALPGQEP

SEQ ID NO: 4679 - protein, 20 aa, Homo sapiens
IPNSFLFSFLDLCYFFVETC

SEQ ID NO: 4680 - protein, 85 aa, Homo sapiens
MSTSLARSSTAVMAAGPTAAAAPMSTVSPAACSPTSNFSWSASSTGQPWHSRTSSWQSKITLSCAWPNAGPHLRACSMRTPTGTP

SEQ ID NO: 4681 - protein, 50 aa, Homo sapiens
LGLLLLLTTTTTTGAASAVPGVSSCSGHTAPGDCSSSNQNLGLTGTLAPK

SEQ ID NO: 4682 - protein, 81 aa, Homo sapiens
ISTAPRTFLSPSTATLMNGRYGRAALTQFCTLTCGGGQTSCWWLLLMPTLWGRWPVASVTTCLPASCGPGTAASPCSSARP

SEQ ID NO: 4683 - protein, 52 aa, Homo sapiens
KSMTSRWRSRICGWRTMGVTAVRSLTGWRMKAVWWSWSCGDGAVCPHISPTC

SEQ ID NO: 4684 - protein, 28 aa, Homo sapiens
RGPTCLPWLSMSLATPWAWATPQPPTPL

SEQ ID NO: 4685 - protein, 47 aa, Homo sapiens
LVASLWFLSGACNPWFTSFQVLAPSSHGSQSPSVNSLDLMSWVQLGH

SEQ ID NO: 4686 - protein, 34 aa, Homo sapiens
MTMTRKKKGPSGSLVSGVPGAQGRRASESTTASS

SEQ ID NO: 4687 - protein, 38 aa, Homo sapiens
MCRFLTWVHWMTLRFGVLLIPSCRLHCCDPSSSPKDAS

SEQ ID NO: 4688 - protein, 24 aa, Homo sapiens
IRIWRERGWSLLLPLCSLFRGLWW

SEQ ID NO: 4689 - protein, 27 aa, Homo sapiens
LGSGIRSAPAVVAAAAAAIAAGQSLAP

SEQ ID NO: 4690 - protein, 50 aa, Homo sapiens
ILFFSHLLAFFFLPPWLPSPNPAIPSSTPVLPSPAILSHPTCNLLSFAPP

SEQ ID NO: 4691 - protein, 73 aa, Homo sapiens
MGPSWMWMRMTLRRLMLPPATVWRIWPHWCTSMSPASCTPCASAMALACCTRMLAPACWFLAPVGPLLCTLRR

SEQ ID NO: 4692 - protein, 39 aa, Homo sapiens
LLTSQWGMLFTLQLTLGLPGALSLGCLMRDVQGFSWVGV

SEQ ID NO: 4693 - protein, 31 aa, Homo sapiens
MIAWLTAGLVSVCCCTLWRFSLELLPEKAPL

SEQ ID NO: 4694 - protein, 97 aa, Homo sapiens
MVSFCVSCLTTCYPMPSTCVRSTCAPRCPSSCALRTLEPSCPPAVRSSASSGASSSKPLTSSMCRILARSSTPCLLCPGPRSPRTGGSCPSPPRRRV

SEQ ID NO: 4695 - protein, 31 aa, Homo sapiens
VHLLPVLSLPGAPAAVAVESPWKCRKRHSAS

SEQ ID NO: 4696 - protein, 26 aa, Homo sapiens
MRRFVAASGVWRGSGSVLRSWLPEAK

SEQ ID NO: 4697 - protein, 38 aa, Homo sapiens
MPWRILSASRLLAAGPPAPTSRALERESSCLLRLYYAW

SEQ ID NO: 4698 - protein, 13 aa, Homo sapiens
ISCIGLIIFNYMA

SEQ ID NO: 4699 - protein, 18 aa, Homo sapiens
MRPLLRICAYLVPLLSTS

SEQ ID NO: 4700 - protein, 42 aa, Homo sapiens
MDVPPGRMKAERVASPPQGCSLIFLFSLASQHSAFCIHHGVW

SEQ ID NO: 4701 - protein, 38 aa, Homo sapiens
RRSRMRPAAVAPASAGAAAAEAAAEAAATAAPPPADLD

SEQ ID NO: 4702 - protein, 34 aa, Homo sapiens
IPFFRLPVARRVRAAAAAARAAVAAAAAAVTCPA

SEQ ID NO: 4703 - protein, 52 aa, Homo sapiens
IWLVPVFLLPAKLGFRPSADSVPHVLGALDIPGSGAYEALWPKVPEVLLVPI

SEQ ID NO: 4704 - protein, 33 aa, Homo sapiens
VCVPLPLLPPPLLLLLAPSLHQPEALCFPSWIC

SEQ ID NO: 4705 - protein, 16 aa, Homo sapiens
LLLLLLVAPLQMYCCP

SEQ ID NO: 4706 - protein, 29 aa, Homo sapiens
RLGCRLSAAALGWCAVVRPRLTAASATQM

SEQ ID NO: 4707 - protein, 25 aa, Homo sapiens
TARRPRACTSLAVSSPSASGAFSVE

SEQ ID NO: 4708 - protein, 30 aa, Homo sapiens
KSRGPAVVAAMLGAAGPAAAACVPGAEQCR

SEQ ID NO: 4709 - protein, 52 aa, Homo sapiens
KLGFFKLGLPFSVSPWAAESQKILSSLYKAAGVPSFFPRGCFWLQLHEIPMV

SEQ ID NO: 4710 - protein, 11 aa, Homo sapiens
RSVIQWLLSLA

SEQ ID NO: 4711 - protein, 30 aa, Homo sapiens
VYLLSSAVMGLMPVAMALMKQVAAQTPSLA

SEQ ID NO: 4712 - protein, 10 aa, Homo sapiens
MLVIWILKMT

SEQ ID NO: 4713 - protein, 16 aa, Homo sapiens
LVICGGMILLNWIIGD

SEQ ID NO: 4714 - protein, 25 aa, Homo sapiens
MLSLFGLACLQRPWPTSTLGASSAM

SEQ ID NO: 4715 - protein, 30 aa, Homo sapiens
IWCVCVCVCVCLGWVYDVSAEHAEVLAGVS

SEQ ID NO: 4716 - protein, 31 aa, Homo sapiens
MIRALLKKRVHTVSSCWFWITLECVSNPKPG

SEQ ID NO: 4717 - protein, 30 aa, Homo sapiens
MARMSGRSAVGVFTCSKGTVAPARPSSSTA

SEQ ID NO: 4718 - protein, 51 aa, Homo sapiens
RLGLGFLQLAPALPAPAAHPPRGRCRNRVTITAWWCSGRAAWARARWCCAS

SEQ ID NO: 4719 - protein, 70 aa, Homo sapiens
IGGRCQAWRPPGALAWCLWLVPWASLWSCSLEAVQQKSPPGLSKNPRTRSACRGVWPLSCVRPRVTPSHE

SEQ ID NO: 4720 - protein, 91 aa, Homo sapiens
MLRYRGSGSLLCGPFLQSDFALLSSPHSPLHLPHQKREVGATTALSAQAPVSCFRVRGKEDPAKAATTIFPWGHGLGRQPGVQPPVVARAR

SEQ ID NO: 4721 - protein, 11 aa, Homo sapiens
ILSAILGLCVS

SEQ ID NO: 4722 - protein, 12 aa, Homo sapiens
TAVLVLNLRLCL

SEQ ID NO: 4723 - protein, 55 aa, Homo sapiens
LPTLVTYCSAGLFPLGSLALFLPQHDFYRDAVVEASRRSPAPVEKIPLVTPTLPP

SEQ ID NO: 4724 - protein, 17 aa, Homo sapiens
LGFAALAALVVQHLRSG

SEQ ID NO: 4725 - protein, 35 aa, Homo sapiens
VKMSLLKAVPCFQAARLAFLCSRGLQVFLSVAAEL

SEQ ID NO: 4726 - protein, 41 aa, Homo sapiens
TLAAQHRGARIGRFVYRLLLLRKLVSVKVILAQMSNKYAPS

SEQ ID NO: 4727 - protein, 28 aa, Homo sapiens
MMITMVMIITTIVEAMKIPTTAMMMAMQ

SEQ ID NO: 4728 - protein, 52 aa, Homo sapiens
LWVWTDLHVLLWGFYSLWIVKTAERDLQSSHISIIKKYWSSWKKSKIYQSNQ

SEQ ID NO: 4729 - protein, 15 aa, Homo sapiens
MPMRASFLLLISIIS

SEQ ID NO: 4730 - protein, 17 aa, Homo sapiens
KRGTLLMGICTAMVLGE

SEQ ID NO: 4731 - protein, 22 aa, Homo sapiens
MKASRSGAFLSLMIRVFFGRSL

SEQ ID NO: 4732 - protein, 50 aa, Homo sapiens
LAALLSFLGLSLPPGLPQIHDVQFSGAGAGCAGHYLPQVLLPRGRQVQAE

SEQ ID NO: 4733 - protein, 18 aa, Homo sapiens
LDWQTQVQWLLCFGLMLN

SEQ ID NO: 4734 - protein, 27 aa, Homo sapiens
RLSGWRRRLPLRCLAITFSIPAAFCPG

SEQ ID NO: 4735 - protein, 33 aa, Homo sapiens
LHCSSSASLLAAAASAARLLRRRGLRQLYRQSP

SEQ ID NO: 4736 - protein, 37 aa, Homo sapiens
TKLRTSSPEAAGLRPAAAAAAAAAQFLEQIQFAFLDL

SEQ ID NO: 4737 - protein, 32 aa, Homo sapiens
ILLLVRDAVSCVIPVIALQALSPSTWSLCPGR

SEQ ID NO: 4738 - protein, 36 aa, Homo sapiens
TTSSVRALTSGWVAAFSMPPGWAALVTTRWDDKLSH

SEQ ID NO: 4739 - protein, 37 aa, Homo sapiens
TTSSVRALTSGWVAAFSMPPGWAALVTTRGCTIAIWS

SEQ ID NO: 4740 - protein, 15 aa, Homo sapiens
LPRPTTCLVAFSLCL

SEQ ID NO: 4741 - protein, 37 aa, Homo sapiens
LSCRLVAMSRLLVLTMEKSASTTIVPMIGSLPLGSSH

SEQ ID NO: 4742 - protein, 29 aa, Homo sapiens
ISKRVSFPTCLLGLRLSHAASFTGELETA

SEQ ID NO: 4743 - protein, 34 aa, Homo sapiens
KFLLLVWVWCTYMAVTYTSGDIQKLLKNGSPVSD

SEQ ID NO: 4744 - protein, 60 aa, Homo sapiens
IISGSLHFICLMEILSDIQQPCKWSGLCQTATNSCRTISEAAYPRSLMWKDMAVTAWGSK

SEQ ID NO: 4745 - protein, 37 aa, Homo sapiens
VILHRGLCIFMIIGSKMLIQELKIGSSCPRLCHKPSS

SEQ ID NO: 4746 - protein, 19 aa, Homo sapiens
MKHMYKLWRASTQILTLMM

SEQ ID NO: 4747 - protein, 34 aa, Homo sapiens
MKRTRLFSSSSTSPSQQTWAYSLSYILCSKMYML

SEQ ID NO: 4748 - protein, 29 aa, Homo sapiens
MLRHSSCKVAIFVPVVVCTLSPGIDSSPS

SEQ ID NO: 4749 - protein, 16 aa, Homo sapiens
MFLSFLMNQILILAFL

SEQ ID NO: 4750 - protein, 30 aa, Homo sapiens
VIALVLKIVIFFTALMHIDLKDSKKQNVHQ

SEQ ID NO: 4751 - protein, 25 aa, Homo sapiens
VIALVLKIVIFFTDLKDSKKQNVHQ

SEQ ID NO: 4752 - protein, 33 aa, Homo sapiens
IRGGGWAALLCALRLTALLSPVSFVAGSFCAGA

SEQ ID NO: 4753 - protein, 39 aa, Homo sapiens
LIGSLERKEALALLLLMTMILWIKSYCRNTIPSMVIMQK

SEQ ID NO: 4754 - protein, 28 aa, Homo sapiens
MLSSSSLSSSSAVVGTSGESTPGTLLHW

SEQ ID NO: 4755 - protein, 30 aa, Homo sapiens
MLSSSSLSSSSAVVGTSGESTPGTLLHCRS

SEQ ID NO: 4756 - protein, 61 aa, Homo sapiens
VQWPSVRMPRAAATAAAAAPAAVARVRAAAAPGPGERQSMEDTRMGGKADSQELHSSRGLW

SEQ ID NO: 4757 - protein, 30 aa, Homo sapiens
KSPQNCHVGMRFAGLVAAAAAGGPAHVKPA

SEQ ID NO: 4758 - protein, 26 aa, Homo sapiens
RKNRPPRIRLQLLGLVLLAWPVPSVS

SEQ ID NO: 4759 - protein, 12 aa, Homo sapiens
VIFCAVFLLDVS

SEQ ID NO: 4760 - protein, 22 aa, Homo sapiens
MARALLVRCFFSLAYSSQLFGL

SEQ ID NO: 4761 - protein, 16 aa, Homo sapiens
TFTCPCLTTLTAMMWL

SEQ ID NO: 4762 - protein, 32 aa, Homo sapiens
ICLVGFLAFYRKAPLMMFVANDRLFSLCKNYG

SEQ ID NO: 4763 - protein, 15 aa, Homo sapiens
VISASPFATYLLLVS

SEQ ID NO: 4764 - protein, 11 aa, Homo sapiens
KRFFFILASIL

SEQ ID NO: 4765 - protein, 19 aa, Homo sapiens
LLLWQFFCFWSIKLWKPTK

SEQ ID NO: 4766 - protein, 101 aa, Homo sapiens
LGSFSWFCLFYFSRGAEFRNKNICPSEFQPEGGVLSRRIYSMRWRPASRERTHMGQEPQMTPPTMVVKMLATHRCWEFFLPLKPQNDFRLPGLTRSTSKYL

SEQ ID NO: 4767 - protein, 27 aa, Homo sapiens
KLRARFLPRELMCVLSTLSTLRAEIAS

SEQ ID NO: 4768 - protein, 18 aa, Homo sapiens
ITSSWCSRLAALTFLLAG

SEQ ID NO: 4769 - protein, 91 aa, Homo sapiens
LARPLLAALRLRLLGLGLGFISRLTSSQSRASSVGFMSLFDENDRRYQKVAIKDLFILLIKPLISQNVCQCQPQRVRPVLSLQDAPSDCQG

SEQ ID NO: 4770 - protein, 40 aa, Homo sapiens
RQWAPLLVGASLGGTQSPCPAPSSTRTSSSAASRVSQPPL

SEQ ID NO: 4771 - protein, 19 aa, Homo sapiens
LRSAWRWPVPGWWAAVVLS

SEQ ID NO: 4772 - protein, 26 aa, Homo sapiens
MMLKRKHVFSSSCIFMWSCSLPNVED

SEQ ID NO: 4773 - protein, 109 aa, Homo sapiens
MTTRARRRRKRRTWSPRRRRRRTATPRRPRILRTTRRMRWKRTTMTPIIRRRWKTTTTTPVTARKAASGAIVPTAALQVGENQEYIGLVLLYWKKKTSRPLNFPSPLRI

SEQ ID NO: 4774 - protein, 65 aa, Homo sapiens
IFVRPPRFVLGARALASLASRRAAPTPRWRRPRLPRRRPPRAAGPCPPWCPGQSPRARPWTPSWR

SEQ ID NO: 4775 - protein, 28 aa, Homo sapiens
MEKIIHVSPFSLICLSLKCKAWTKILLH

SEQ ID NO: 4776 - protein, 40 aa, Homo sapiens
INWSPARLQSLRMLSCLMSSASTKPCWALSGMNAIVGIFF

SEQ ID NO: 4777 - protein, 50 aa, Homo sapiens
MASLKLMLSAGPFVGWVSQMIPFSDWPRPMASSQRTFDWRESQMWNICHK

SEQ ID NO: 4778 - protein, 17 aa, Homo sapiens
VVLLLVAVRLHTLLSCP

SEQ ID NO: 4779 - protein, 41 aa, Homo sapiens
KAAMTWARNPSTRKPPPMSSTREACLWALAWTLAGREARGF

SEQ ID NO: 4780 - protein, 32 aa, Homo sapiens
KGPRLRMSMQMVVYVWTYFRTVGVQPMMCLPF

SEQ ID NO: 4781 - protein, 18 aa, Homo sapiens
LDWDRRTHILATCLWLMC

SEQ ID NO: 4782 - protein, 14 aa, Homo sapiens
ILSSSCRKILLLLL

SEQ ID NO: 4783 - protein, 18 aa, Homo sapiens
IWICAALLVTRKTLVRTL

SEQ ID NO: 4784 - protein, 96 aa, Homo sapiens
IGVLRKVRLAGTWLWVGWTGCRTECPAVGRSMRQSDAHPGAQHRSNCRRHCLRLCAARGCVPEQEARFLGLELPFLASGKSPRTESKGQILSVSAV

SEQ ID NO: 4785 - protein, 22 aa, Homo sapiens
ITPLFGLNLAWLLVLRTLERWC

SEQ ID NO: 4786 - protein, 15 aa, Homo sapiens
ITLRLLLVSIHMNWL

SEQ ID NO: 4787 - protein, 32 aa, Homo sapiens
ISFCLRLGLLFLFADETGFHHVGQAGLQFLTS

SEQ ID NO: 4788 - protein, 8 aa, Homo sapiens
IAYFGILI

SEQ ID NO: 4789 - protein, 43 aa, Homo sapiens
MMDVPPGRMKAERVASPPQGCSLIFLFSLASQHSAFCIHHGVW

SEQ ID NO: 4790 - protein, 11 aa, Homo sapiens
VAKWMVCLFAV

SEQ ID NO: 4791 - protein, 24 aa, Homo sapiens
MTRSNGFCDAVWTLLSLNSMCVLL

SEQ ID NO: 4792 - protein, 23 aa, Homo sapiens
LKLTLKMILTLMYILEKQRLLLF

SEQ ID NO: 4793 - protein, 27 aa, Homo sapiens
LPTQWKAPLVGRLLSLALLPVLVWPSI

SEQ ID NO: 4794 - protein, 22 aa, Homo sapiens
RFSSLSFWISLFLVLSTKDPFL

SEQ ID NO: 4795 - protein, 19 aa, Homo sapiens
LMTAIWVILWLSEISMVMA

SEQ ID NO: 4796 - protein, 12 aa, Homo sapiens
MQCFWILLIPVA

SEQ ID NO: 4797 - protein, 22 aa, Homo sapiens
VVLIKNLVWTLALFAFYKPNSI

SEQ ID NO: 4798 - protein, 24 aa, Homo sapiens
IPLSQKILSEQLCTLFLACASGWC

SEQ ID NO: 4799 - protein, 30 aa, Homo sapiens
KNFLRCSFFSSSPSWLTSAISGPTQMSLRK

SEQ ID NO: 4800 - protein, 30 aa, Homo sapiens
LLEGSNQPAPLALLLVCAAFQRENSCSKRK

SEQ ID NO: 4801 - protein, 17 aa, Homo sapiens
LPSMTFILMTFLSTLMP

SEQ ID NO: 4802 - protein, 18 aa, Homo sapiens
LDILSMIIQYLLMGSLFS

SEQ ID NO: 4803 - protein, 29 aa, Homo sapiens
LGKNRIWSCHLCCACLIGDVHCLTPFKSS

SEQ ID NO: 4804 - protein, 11 aa, Homo sapiens
LALMVLMVFLD

SEQ ID NO: 4805 - protein, 14 aa, Homo sapiens
MTLFWKMLLLQSAL

SEQ ID NO: 4806 - protein, 31 aa, Homo sapiens
RASLSQLSGALLVAAVSSEFLALSMRRLVVF

SEQ ID NO: 4807 - protein, 47 aa, Homo sapiens
LSFTPPLSAATAAAAAAAAAAARIAAAPSLARRRYLLGQVRSSPEIL

SEQ ID NO: 4808 - protein, 11 aa, Homo sapiens
LGVVFSLIFLF

SEQ ID NO: 4809 - protein, 66 aa, Homo sapiens
LHQSTVRFMKKNKLRTTLYVHLQMPQLMLVGCLSAFCDNEHMDFCLLNSVDPFSQLPGAWIFTSNC

SEQ ID NO: 4810 - protein, 32 aa, Homo sapiens
LWFLYFFFSLYQKVFFNGKKNNFLFSFTNEFQ

SEQ ID NO: 4811 - protein, 59 aa, Homo sapiens
LALFLSLQGALGGTGSSQILLLVYSYHLASVFLGNAAVLMHLVSFWSYSGQAFVTALWD

SEQ ID NO: 4812 - protein, 17 aa, Homo sapiens
LMNFYITVHVLCFAVIP

SEQ ID NO: 4813 - protein, 115 aa, Homo sapiens
IRAPRQLLRLPAGGPALARPASARCPAARTLPTLLSSPTLELPLCLSCCCAGAPTAERRLQSRRDAPTLRRRWRRRGGPGTLRHGRDDPLQGRGRSSEGKDLRRDQSSRRGRRFS

SEQ ID NO: 4814 - protein, 10 aa, Homo sapiens
IWLNAILWIF

SEQ ID NO: 4815 - protein, 29 aa, Homo sapiens
MMERSMMILLMAASMTMTSTQLWSFCCVH

SEQ ID NO: 4816 - protein, 36 aa, Homo sapiens
LPPLGLSSSSLFLCSQSSIIDPTTCALKTECSISEL

SEQ ID NO: 4817 - protein, 76 aa, Homo sapiens
VKSVAFLLSSSRSLVVLQMPHASRGPGSPLPSPPLLAGPRAGSCGKEWRVGRWPRGWPGARPAPVVSGGTALPSRG

SEQ ID NO: 4818 - protein, 28 aa, Homo sapiens
MEVLGCGAAGCGCAQGDGMESLSWHSYK

SEQ ID NO: 4819 - protein, 40 aa, Homo sapiens
LLFKTRKRRRKRKKRKMLGNIYLTCSTARTLASCCYSCKY

SEQ ID NO: 4820 - protein, 31 aa, Homo sapiens
MAPLRRLTVWRVGLRLGPAGAAGGPGEASSV

SEQ ID NO: 4821 - protein, 141 aa, Homo sapiens
RRRGPGSGAKRPRCATSWGSSWPAMAATPRLWSSTGRSCSFGSALTTLWAVPWPTARSESAWPRWRTTRLPCSTSTSTWSWHIPCATTRSCRGPGPPSAAPTWTSMTTASRGMLCCRHRLPLRRAWLLWMRSWRGHWPRES

SEQ ID NO: 4822 - protein, 28 aa, Homo sapiens
LLLLMCTARAMLTGTSSQKICCLMNIIN

SEQ ID NO: 4823 - protein, 33 aa, Homo sapiens
ISFFYLFLLAPKLPGSHFLLLEFNQILPTPAPS

SEQ ID NO: 4824 - protein, 20 aa, Homo sapiens
MMMSNVMLMLQLQPLLAQPL

SEQ ID NO: 4825 - protein, 48 aa, Homo sapiens
LAAVATCLVASAAVGSWGDGGAGAGLAVQESQPWPPPSRIWSIWHLCT

SEQ ID NO: 4826 - protein, 55 aa, Homo sapiens
MGFGSLQALSAAARSAMVTWWSRDTSGAAVGGTRGERGRRLRPGTGCCHPSLPFL

SEQ ID NO: 4827 - protein, 67 aa, Homo sapiens [sequence omitted]

SEQ ID NO: 4828 - protein, 23 aa, Homo sapiens
MESRTLLLLFSGAVALIQTWAGP

SEQ ID NO: 4829 - protein, 128 aa, Homo sapiens
MSEHRNEALGNYLEMRLKSSFLRGLGSWKSNPLRLGGWTILLTLTMGQGEPGGPQGDPWVPHELLLPSLCDSSHASSWGSGSITCAWRGGDSSSHPLVSGHILSNSPVAAVMCSSMGTHLSPFKGTLL

SEQ ID NO: 4830 - protein, 88 aa, Homo sapiens
MTRHAKCVGIPAALATTRPAPRQDGGLNAAGSGGKLRSAFPQLLAASAPISAEDSGAPGTGRNYSAYLERRRDSDLPQSNPRAGTCCH

SEQ ID NO: 4831 - protein, 36 aa, Homo sapiens
MPRSRPPSQAPPAPPHPGLPAVLLPPPPLPASSTGP

SEQ ID NO: 4832 - protein, 124 aa, Homo sapiens
MGMKAACWRGRRTRRAGPLPSMLHPGPCAWAFSQWPPHSRTGHSPGRRLHGCRRPRGPWARQPLSTVARSGVLEPSGCLADKGRSVCPLLVLVEDPRSDVLGQSWSQTEPGVVCRAALGPGGCV

SEQ ID NO: 4833 - protein, 52 aa, Homo sapiens
MNLSSPPCLALLTNRACLAVNWHRVTLFPGIQVCNQNTGEEKLQDPCPHLSS

SEQ ID NO: 4834 - protein, 35 aa, Homo sapiens
RMRPAAVAPASAGAAAAEAAAEAAATAAPPPADLD

SEQ ID NO: 4835 - protein, 19 aa, Homo sapiens
TAMKLVFFGGGFSIVLSMC

SEQ ID NO: 4836 - protein, 112 aa, Homo sapiens [sequence omitted]

SEQ ID NO: 4837 - protein, 28 aa, Homo sapiens
LHSVDFQGKKKTVLVVVIINIWTSVMVK

SEQ ID NO: 4838 - protein, 31 aa, Homo sapiens
LLLVRDAVSCVIPVIALQALSPSTWSLCPGR

SEQ ID NO: 4839 - protein, 32 aa, Homo sapiens
IKNLRWGKKALLSLTLIFCRYFVTQEDLIYSQ

SEQ ID NO: 4840 - protein, 27 aa, Homo sapiens
VARRVRAAAAAARAAVAAAAAAVTCPA

SEQ ID NO: 4841 - protein, 19 aa, Homo sapiens
VLLLLFTLLLGFYEGFVKS

SEQ ID NO: 4842 - protein, 53 aa, Homo sapiens
ILGSGITALMSQFCCHPALSMASQFPKSAWKMWGAPHRLANGKRMKIGLTSLS

SEQ ID NO: 4843 - protein, 13 aa, Homo sapiens
VDHFGFLFCVWQF

SEQ ID NO: 4844 - protein, 24 aa, Homo sapiens
KTHLFTILVLCKSSYLSGSQLSHL

SEQ ID NO: 4845 - protein, 39 aa, Homo sapiens
RYQHCKHQVCLETCLCLSFLSSVSTGYVSHCQIPDHKSP

SEQ ID NO: 4846 - protein, 25 aa, Homo sapiens
MTGTASRLAGSSALGFCAPWASSSS

SEQ ID NO: 4847 - protein, 37 aa, Homo sapiens
VEARTRGGAGTAAAAAAAGGTLIPVLRTPRASPWLTS

SEQ ID NO: 4848 - protein, 54 aa, Homo sapiens
MFFTLSVILVALSRELSFSGRMEFRRWWNLTQFKVPSGPRPLSMGLISILAVAL

SEQ ID NO: 4849 - protein, 21 aa, Homo sapiens
IKLRNIYTGFMAGILPMFMVE

SEQ ID NO: 4850 - protein, 44 aa, Homo sapiens
LKTYRGRRTGIILFVSCFETSICKVSVESQILAPGTFYIHKYKN

SEQ ID NO: 4851 - protein, 47 aa, Homo sapiens
LCQLLLFWKMWTSTKWFHWKQIVVLTMHPFPQALNSQQVPTRMMMSS

SEQ ID NO: 4852 - protein, 29 aa, Homo sapiens
RNLYATISSLSFLLALEALVENGHQTKSR

SEQ ID NO: 4853 - protein, 22 aa, Homo sapiens
LGERYLSFSLSLSLRVVCWFSA

SEQ ID NO: 4854 - protein, 11 aa, Homo sapiens
LLIVWAMIISG

SEQ ID NO: 4855 - protein, 45 aa, Homo sapiens
MLGLSIILNLLFLRENTRFCWNCTLKNGPPWPVPMLLSCAPDCGL

SEQ ID NO: 4856 - protein, 12 aa, Homo sapiens
RNLHLFWLLQMW

SEQ ID NO: 4857 - protein, 21 aa, Homo sapiens
VAGPASWKLFLMQVVLLPYAF

SEQ ID NO: 4858 - protein, 17 aa, Homo sapiens
ILILVLFSFPSRTRETS

SEQ ID NO: 4859 - protein, 12 aa, Homo sapiens
LIYSSMILVLPW

SEQ ID NO: 4860 - protein, 8 aa, Homo sapiens
MVVLLFWI

SEQ ID NO: 4861 - protein, 23 aa, Homo sapiens
LWKDLGLLLSQLSMDSASRPFLT

SEQ ID NO: 4862 - protein, 77 aa, Homo sapiens
IGSSRCLFHHQMPWRPWSVPWAWPSAWWASSWAPSSSSWAHMCPVSPGNDPSERNDLWETPCRSSWVCDSPCVLSAL

SEQ ID NO: 4863 - protein, 27 aa, Homo sapiens
MCCVRTTAAATIFTCGVRARTACLSCS

SEQ ID NO: 4864 - protein, 12 aa, Homo sapiens
RIMCVGVSWTLL

SEQ ID NO: 4865 - protein, 23 aa, Homo sapiens
RYCSSFLLIFAGQSMLYLNPTLI

SEQ ID NO: 4866 - protein, 28 aa, Homo sapiens
MMIKDTFILTLKPILLFSALNQGRSLWV

SEQ ID NO: 4867 - protein, 8 aa, Homo sapiens
LKLILFLL

SEQ ID NO: 4868 - protein, 14 aa, Homo sapiens
VIPWMVTILLNAAP

SEQ ID NO: 4869 - protein, 20 aa, Homo sapiens
VSTMIIFLSWLVNKQYLLSN

SEQ ID NO: 4870 - protein, 27 aa, Homo sapiens
MRGLRSMPSILSNLISLDTNMALSALR

SEQ ID NO: 4871 - protein, 11 aa, Homo sapiens
ILTWAALVMIR

SEQ ID NO: 4872 - protein, 22 aa, Homo sapiens
MLIRASLGSGLLTCHQRSSTGF

SEQ ID NO: 4873 - protein, 46 aa, Homo sapiens
KPSLTAPALSLPSLLPARASCSQVGRWWQLQRPQCQRFRTRLQPCS

SEQ ID NO: 4874 - protein, 47 aa, Homo sapiens
LSFLWTKMSFLRVIFKFKRCSCRCCSIFAVTLRAWRDSSQEVSCSLC

SEQ ID NO: 4875 - protein, 63 aa, Homo sapiens
LSFLFRCLVFLLSFNNVPDPVLGACSFTCPFHLFSGSSCVEHSCLQQVVFITLSFHYKLLLQL

SEQ ID NO: 4876 - protein, 20 aa, Homo sapiens
MDNKYLWNYIMELLLCHLVG

SEQ ID NO: 4877 - protein, 37 aa, Homo sapiens
MRRHSKRAWPALPAGGLRCTCCASMAIERTQISRRTL

SEQ ID NO: 4878 - protein, 29 aa, Homo sapiens
LGTHVTLLVMAWQSLICKSFFWIVPNDSL

SEQ ID NO: 4879 - protein, 21 aa, Homo sapiens
ISPRKWFLSSPVWSLLTTLFS

SEQ ID NO: 4880 - protein, 31 aa, Homo sapiens
MATSTFQFQCLVFMAIMTIPQGQMHFVPWTF

SEQ ID NO: 4881 - protein, 31 aa, Homo sapiens
VLAAVFQLSLGTAAVGRFQCIASPGCSSSWI

SEQ ID NO: 4882 - protein, 25 aa, Homo sapiens
IRVSTPLLSFLATLLQSSTNYPCPG

SEQ ID NO: 4883 - protein, 14 aa, Homo sapiens
KNMLQETLWFPLFL

SEQ ID NO: 4884 - protein, 16 aa, Homo sapiens
KGGLATKACLLAAAIC

SEQ ID NO: 4885 - protein, 22 aa, Homo sapiens
RKSPILCALVLVPLWTKRCCPL

SEQ ID NO: 4886 - protein, 33 aa, Homo sapiens
MIGLVSKTNAIISLKKKEIGIQVNTTVPLNMPT

SEQ ID NO: 4887 - protein, 20 aa, Homo sapiens
TLLGGVFSPALAGFMISLRL

SEQ ID NO: 4888 - protein, 15 aa, Homo sapiens
KFFMSLLISCHFHIM

SEQ ID NO: 4889 - protein, 52 aa, Homo sapiens
KLPIKKKRMSNKGKKLKRIILAIPPAAPATVAMRPVEAAPSGRQATITKPSL

SEQ ID NO: 4890 - protein, 17 aa, Homo sapiens
MLGTYPVYILPRHPAWK

SEQ ID NO: 4891 - protein, 10 aa, Homo sapiens
IVKTSIFIWL

SEQ ID NO: 4892 - protein, 13 aa, Homo sapiens
IVVVVLLLLWLQF

SEQ ID NO: 4893 - protein, 39 aa, Homo sapiens
MIVTGGIAVPTAALTWPTTTTSSPSPSRAVRGVPTSSTQ

SEQ ID NO: 4894 - protein, 14 aa, Homo sapiens
MTFFGCLWLCRAVW

SEQ ID NO: 4895 - protein, 30 aa, Homo sapiens
MKRRLLIMLLFQHKSSGLSVSLVSGNHRKL

SEQ ID NO: 4896 - protein, 41 aa, Homo sapiens
IQLSNFLFLVWLLWCAKLRTLLFCHTATPYRCGRCEICHQL

SEQ ID NO: 4897 - protein, 12 aa, Homo sapiens
RHMHILLLQLHL

SEQ ID NO: 4898 - protein, 23 aa, Homo sapiens
IVIFPILVLGASKLSSLLDNQPE

SEQ ID NO: 4899 - protein, 34 aa, Homo sapiens
LRTRGQCGWLALPLAGAFPEDGVRSVGYSWMEHL

SEQ ID NO: 4900 - protein, 31 aa, Homo sapiens
KSPPCTWCCACEVALLSLLSASLPRNTTATR

SEQ ID NO: 4901 - protein, 32 aa, Homo sapiens
MGCDTLLFFFFLFFQSFLLAQLQCVPEWGRGG

SEQ ID NO: 4902 - protein, 31 aa, Homo sapiens
LLLARLYFTWDMLLCWDSCMSTGLSSTCSRP

SEQ ID NO: 4903 - protein, 25 aa, Homo sapiens
KSTSTCLTWVASAMNAASGSSASTM

SEQ ID NO: 4904 - protein, 16 aa, Homo sapiens
RERHNWLQPFSCLFLL

SEQ ID NO: 4905 - protein, 25 aa, Homo sapiens
MAQSRLTATSVSQAQAILLPQTPRF

SEQ ID NO: 4906 - protein, 16 aa, Homo sapiens
MQHTLWIACGTVLLSC

SEQ ID NO: 4907 - protein, 12 aa, Homo sapiens
VILNVFILTFLT

SEQ ID NO: 4908 - protein, 23 aa, Homo sapiens
MLSILICQVILKNMCIVLAVQDV

SEQ ID NO: 4909 - protein, 16 aa, Homo sapiens
LKTLFLKWFVLMLLSN

SEQ ID NO: 4910 - protein, 39 aa, Homo sapiens
LRRSRMRPAAVAPASAGAAAAEAAAEAAATAAPPPADLD

SEQ ID NO: 4911 - protein, 26 aa, Homo sapiens
RFGLVVPLRAAAAISVVGPAWWPKTG

SEQ ID NO: 4912 - protein, 22 aa, Homo sapiens
RTEFIVWHLYLMPALFNTSPLR

SEQ ID NO: 4913 - protein, 31 aa, Homo sapiens
IKLEIVCRLISLLTCSSVSAMFEIFVLDGES

SEQ ID NO: 4914 - protein, 15 aa, Homo sapiens
LILLSHPFFSLLLFA

SEQ ID NO: 4915 - protein, 9 aa, Homo sapiens
IWMASVAFM

SEQ ID NO: 4916 - protein, 46 aa, Homo sapiens
MMAPASKTLTGASHLWGAALWSLQAPGRWGSQPSCTRSGCRGARSC

SEQ ID NO: 4917 - protein, 18 aa, Homo sapiens
MFAAMGSWRYILSHLWLM

SEQ ID NO: 4918 - protein, 54 aa, Homo sapiens
RIATVSIAAAVAPLTLFLYRGDGGLSSRRRADAAAGAFQLMWRSRCEATYKSIY

SEQ ID NO: 4919 - protein, 42 aa, Homo sapiens
LAAAALAAVGGRAGGEGGGGEKRRWRRLGLAPLKSAYPLAAS

SEQ ID NO: 4920 - protein, 19 aa, Homo sapiens
IAYLYWVSLMPAWTILEAV

SEQ ID NO: 4921 - protein, 39 aa, Homo sapiens
MEWRHMSSTSLVPGASPSVPKASCTAASSALATVWPTRQ

SEQ ID NO: 4922 - protein, 12 aa, Homo sapiens
LLSLYLFLLTLL

SEQ ID NO: 4923 - protein, 25 aa, Homo sapiens
RGVTSLLLSLSSSSAPRFRGCPSAL

SEQ ID NO: 4924 - protein, 12 aa, Homo sapiens
IMKKKMLLYWIL

SEQ ID NO: 4925 - protein, 23 aa, Homo sapiens
LGRGELLEKMVKLVLLVLWARRV

SEQ ID NO: 4926 - protein, 16 aa, Homo sapiens
KVFMGLFLALIQVCMK

SEQ ID NO: 4927 - protein, 15 aa, Homo sapiens
MMKIGLPLSLILIPW

SEQ ID NO: 4928 - protein, 20 aa, Homo sapiens
IVLLLLFTLLLGFYEGFVKS

SEQ ID NO: 4929 - protein, 17 aa, Homo sapiens
LKEKEALWLYILWAWVS

SEQ ID NO: 4930 - protein, 17 aa, Homo sapiens
LGTKLLISFATLCIPSL

SEQ ID NO: 4931 - protein, 51 aa, Homo sapiens
VRDWVWPAALVSAVSCALHAGSALQGLLSAQRTPAARGRRGPELPPAVFTH

SEQ ID NO: 4932 - protein, 11 aa, Homo sapiens
MLVLGIMISTT

SEQ ID NO: 4933 - protein, 9 aa, Homo sapiens
LAVLWGFWS

SEQ ID NO: 4934 - protein, 63 aa, Homo sapiens
MVVGVQLPGTILGSGITALMSQFCCHPALSMASQFPKSAWKMWGAPHRLANGKRMKIGLTSLS

SEQ ID NO: 4935 - protein, 11 aa, Homo sapiens
RHRFLLNLLLL

SEQ ID NO: 4936 - protein, 14 aa, Homo sapiens
IGAFSCSLLLEFFS

SEQ ID NO: 4937 - protein, 26 aa, Homo sapiens
LLLALGVLLLVPVPWMKASLRASWEE

SEQ ID NO: 4938 - protein, 60 aa, Homo sapiens
TGVGGLRSTRAEAGLGKRSRDLQGLYISAGSLRPFPGVIPSCAVVLWSSVLLSPSAFSPT

SEQ ID NO: 4939 - protein, 58 aa, Homo sapiens
RSVTAGAFWNAAILLPSSRGATSRVSQTAWSGFFALVLPRSLYSGRAVHGSVELSSLR

SEQ ID NO: 4940 - protein, 54 aa, Homo sapiens
LLRHQAEGYRQGSCDLNPLLPQYRILSLTLPFVFPPMFKMFGWFVVLPGDKVLT

SEQ ID NO: 4941 - protein, 14 aa, Homo sapiens
LFLVLIYFCLPFPT

SEQ ID NO: 4942 - protein, 52 aa, Homo sapiens
LEAQVVLLLLSHGARCFLITWLPPRPLCSCLLFGCRRCCLWPPAFCCYPESC

SEQ ID NO: 4943 - protein, 34 aa, Homo sapiens
MKEHLPCLKLLETRGPTTPVAFVGAVVAAAPASL

SEQ ID NO: 4944 - protein, 11 aa, Homo sapiens
TIVMLSMLSSL

SEQ ID NO: 4945 - protein, 61 aa, Homo sapiens
MQQKPHRLERNKSSFLCPGAGCGALAEPSLQSPPGPLAVEGGASRGDRGTRRAEPGGPQGP

SEQ ID NO: 4946 - protein, 10 aa, Homo sapiens
MLRFLTVCFA

SEQ ID NO: 4947 - protein, 125 aa, Homo sapiens
ISFLHIQVRWRLLWRLGPRALETSALAPASLLPWPGAAALPRRQHGWPPGRGLGGGGPAARRGRLLLHLQADPGSAAGRPRARDTLFEVRRCPGRRDVRGSVVRALGPASDGRYLGVTVVQDLAA

SEQ ID NO: 4948 - protein, 17 aa, Homo sapiens
KWGMTSWGTLWWASGCG

SEQ ID NO: 4949 - protein, 41 aa, Homo sapiens
VVVKMVTLMMMVMMMMMTEVVMAYPFISVCHAHPIENHRKR

SEQ ID NO: 4950 - protein, 12 aa, Homo sapiens
RPVIVAMSLVLV

SEQ ID NO: 4951 - protein, 15 aa, Homo sapiens
VCLFARLVIYLLCLN

SEQ ID NO: 4952 - protein, 33 aa, Homo sapiens
IWQTVKRVRLHCTRLPASGTGLCASFWWMQEHL

SEQ ID NO: 4953 - protein, 37 aa, Homo sapiens
LEGIMILDKTKAPNLTMFCLLSLAACKQLFAKNPGHC

SEQ ID NO: 4954 - protein, 15 aa, Homo sapiens
MQKPRVVFLLMMQIL

SEQ ID NO: 4955 - protein, 40 aa, Homo sapiens
MRISQLWLSACMHESSSFLLNSLALWTLLPRRAKTPELEA

SEQ ID NO: 4956 - protein, 11 aa, Homo sapiens
LWITSCWLIAL

SEQ ID NO: 4957 - protein, 20 aa, Homo sapiens
LGLNRVTWILSFLPSHMLTF

SEQ ID NO: 4958 - protein, 31 aa, Homo sapiens
MKATGAAPGTAFASTQNQCSGSEILDRKSIL

SEQ ID NO: 4959 - protein, 9 aa, Homo sapiens
ISRTLVFLL

SEQ ID NO: 4960 - protein, 31 aa, Homo sapiens
MSSSAWGQSLCSWASWAASAPSTRSAACWGW

SEQ ID NO: 4961 - protein, 37 aa, Homo sapiens
MSSSAWGQSLCSWASWAASAPSTRSAACWGCTLLSCS

SEQ ID NO: 4962 - protein, 10 aa, Homo sapiens
IFLMTLTCVG

SEQ ID NO: 4963 - protein, 38 aa, Homo sapiens [sequence omitted]

SEQ ID NO: 4964 - protein, 14 aa, Homo sapiens
VQVWALTWLWMQSF

SEQ ID NO: 4965 - protein, 32 aa, Homo sapiens
MVVLMFLSAGPIVPLLRNVSPVQGQRLKRLLY

SEQ ID NO: 4966 - protein, 50 aa, Homo sapiens
IIPQRAAAAALGMLSLRAPLGRREASSGSGLRSVGASARLSPALAGLSGP

SEQ ID NO: 4967 - protein, 25 aa, Homo sapiens
ILLRTLLVVVLIDFLLSIYLKDGTD

SEQ ID NO: 4968 - protein, 37 aa, Homo sapiens
MLLNQTLSRLLCAASGASTWWAVHSPALLSLRGLVYP

SEQ ID NO: 4969 - protein, 22 aa, Homo sapiens
MSHLAACTCAWSVSPPVPLLLS

SEQ ID NO: 4970 - protein, 40 aa, Homo sapiens
LRSRRHRLGALSWPLFPQMSDSDSRTEKRKKKRPNGKATF

SEQ ID NO: 4971 - protein, 20 aa, Homo sapiens
ILQSLLILFLGVTIFEAKLT

SEQ ID NO: 4972 - protein, 13 aa, Homo sapiens
LLWLSLICLLGLL

SEQ ID NO: 4973 - protein, 9 aa, Homo sapiens
LPFFFLFSL

SEQ ID NO: 4974 - protein, 82 aa, Homo sapiens
MESSGRAGQRRLGPPLEGVLLFLLAPAALAGPSCGPFPQAGAAAALTHFLLQTARGPTCLPWLSMSLATPWAWATPQPPTPL

SEQ ID NO: 4975 - protein, 65 aa, Homo sapiens
MQCTLSYSPSHWLKSSSGLTPIHQRRQDSPCWLLPALLTSAASYGSTLRRVPGCILCLPNSASWV

SEQ ID NO: 4976 - protein, 23 aa, Homo sapiens
IRTGTLALSLVSGAATCPVFPVS

SEQ ID NO: 4977 - protein, 66 aa, Homo sapiens
ILLFLDFFLIKRLLQCLSCDSGMDICPRLSCWGPSMSLQVPSWSPSPALEAWLRASWRRSFGSMLS

SEQ ID NO: 4978 - protein, 22 aa, Homo sapiens
TPFLITSSWCSRLAALTFLLAG

SEQ ID NO: 4979 - protein, 30 aa, Homo sapiens
LYSQLFSFCKFFFFAVIPTLVTRSFSANCS

SEQ ID NO: 4980 - protein, 47 aa, Homo sapiens
LRARRAVLTAPRTLVSSLFSPRPSLGRAGTLAFPVPHGAAPTPDGVQ

SEQ ID NO: 4981 - protein, 13 aa, Homo sapiens
IFLLLVVFLPFPC

SEQ ID NO: 4982 - protein, 34 aa, Homo sapiens
VRFLFGFLPASGATRVARQQPLGDLVLGSCPAWG

SEQ ID NO: 4983 - protein, 37 aa, Homo sapiens
LCVLQIVTLMVAPMAWLEDKQIEDIGNGVIKMIDHEA

SEQ ID NO: 4984 - protein, 37 aa, Homo sapiens
LMLPCGTCHGAGTAALSRPAVVAAAAAAAGPERRSCH

SEQ ID NO: 4985 - protein, 51 aa, Homo sapiens
MGRAFPSRHKTARFECALVSASLTTAGTPGKNLSSYNSKCGGKTHQSRDGK

SEQ ID NO: 4986 - protein, 13 aa, Homo sapiens
VWVLLSVVWLWDP

SEQ ID NO: 4987 - protein, 27 aa, Homo sapiens
IDLENKVSTRCFVVSVFLLFTLPESVL

SEQ ID NO: 4988 - protein, 28 aa, Homo sapiens
LIWLLGCYLEIQALKMPASLDLEDDLDK

SEQ ID NO: 4989 - protein, 71 aa, Homo sapiens
LMKTLYSLCVTPIGQSMSSMYTTIPRSNYSLNKMMTLKFPPMKTSSGMKRRMKSIQEMTVMGQSLLRSAHG

SEQ ID NO: 4990 - protein, 26 aa, Homo sapiens
LSKVATLTVFSCCLCHLLCQKIPFQL

SEQ ID NO: 4991 - protein, 29 aa, Homo sapiens
LPPHSLSPLVLLTPGVSLSAFPNPPIPPV

SEQ ID NO: 4992 - protein, 59 aa, Homo sapiens
ILVFLLLFSSFVFFFSLETGSSYVGQAGLESPGSSDPPASASGKVGLQARIAAPGQSLF

SEQ ID NO: 4993 - protein, 63 aa, Homo sapiens
MLGAPAFLAAIQHSVHAPRGQRLLPPGAIAASAVSTAQPLSLCLRQPCRAAHPEARARMGSLR

SEQ ID NO: 4994 - protein, 45 aa, Homo sapiens
MGAFLLATSLKWNLLVALLPLQLWCYTEKLEVSKQTREKEKHQKV

SEQ ID NO: 4995 - protein, 82 aa, Homo sapiens
MWPLQHISVASVSVVSFLCLAPHGFKSTRAGVETAHLALILSDWWFWPVSRTTPGQFRGSFKGTRKGPGALFAQLCWGAALL

SEQ ID NO: 4996 - protein, 48 aa, Homo sapiens
MTSLSIPSQNCSKRLLSSSLCSSCACSKALWKAEPTQFKGPDSGDLVS

SEQ ID NO: 4997 - protein, 58 aa, Homo sapiens
MKKNKLRTTLYVHLQMPQLMLVGCLSAFCDNEHMDFCLLNSVDPFSQLPGAWIFTSNC

SEQ ID NO: 4998 - protein, 42 aa, Homo sapiens
MAATSQLAMNMLLTVTHTHSSLFRPSWAVPSSIGCLMTAGKR

SEQ ID NO: 4999 - protein, 37 aa, Homo sapiens
MSRVELAESRALLHPTGLCVLGLARGEPRWQSSRTRP

SEQ ID NO: 5000 - protein, 53 aa, Homo sapiens
MAPACAKLVLLGTTLPEPCFLPSSGAPDTRASWWAWARRTPTWATRPRASVAS

SEQ ID NO: 5001 - protein, 37 aa, Homo sapiens
RRILFLFLFLFWPTAAAMALSSSAGVHPASWVPELPV

SEQ ID NO: 5002 - protein, 38 aa, Homo sapiens
LRVLLCLISLLLLCYMCVCHFQFFVKDTKNLGLHNTSR

SEQ ID NO: 5003 - protein, 37 aa, Homo sapiens
IYCSGCFLIPVLLGPGSFAPCPAPRRGGWCGNGWARW

SEQ ID NO: 5004 - protein, 19 aa, Homo sapiens
TAMKLVFLGGDFSIVLSMC

SEQ ID NO: 5005 - protein, 37 aa, Homo sapiens
MVHLGILGTSVFQATTSLSTSSSYFVSGLCTCHRIRY

SEQ ID NO: 5006 - protein, 69 aa, Homo sapiens
VKQTHRILVIISGSLHFICLMEILSDIQQPCKWSGLCQTATNSCRTISEAAYPRSLMWKDMAVTAWGSK

SEQ ID NO: 5007 - protein, 26 aa, Homo sapiens
LLLTLSLFKLSLQLDARITFGAESPG

SEQ ID NO: 5008 - protein, 12 aa, Homo sapiens
LASFLTYVAVAF

SEQ ID NO: 5009 - protein, 33 aa, Homo sapiens
LTSTAGLTFRLIFLVAPPLHSRPKSPRTFSSSC

SEQ ID NO: 5010 - protein, 33 aa, Homo sapiens
RYSMSGLMPLLAICPSQPTTQTSGRDGGRTQSK

SEQ ID NO: 5011 - protein, 49 aa, Homo sapiens
RYSMSGLMPLLAICPSQPTTQTSGRDGGRTQSKWTCISSWPKTMFLSIA

SEQ ID NO: 5012 - protein, 36 aa, Homo sapiens
RYSMSGLMPLLAICPSQPTTQTSGRDGGRTQSNPRS

SEQ ID NO: 5013 - protein, 17 aa, Homo sapiens
TKVSALMCFLPLMHWVS

SEQ ID NO: 5014 - protein, 12 aa, Homo sapiens
LYWGYLGLCSLL

SEQ ID NO: 5015 - protein, 25 aa, Homo sapiens
RGFCFCFFLSFSCCRRVRRTFCLPP

SEQ ID NO: 5016 - protein, 103 aa, Homo sapiens
LAGSGPVKQPGSWLCAAWGAVLAWGAVLACAGASAPPGSCIPVSRAAALRAWKTGTGHSLPRRHPGSPRFTPKRETKGFLVPSQEKGDPKMTKCLKPWELQMN

SEQ ID NO: 5017 - protein, 33 aa, Homo sapiens
LGAPWFRRQPPASSSFCCCSWGLCLLPTPALCP

SEQ ID NO: 5018 - protein, 21 aa, Homo sapiens
VRTPATWYSSSWMLIIACLPP

SEQ ID NO: 5019 - protein, 14 aa, Homo sapiens
TWAAPGAALVLVSF

SEQ ID NO: 5020 - protein, 21 aa, Homo sapiens
LVTFLYMVRFYILIRPTPWDI

SEQ ID NO: 5021 - protein, 97 aa, Homo sapiens
ITLFVASASVSGWALTSHLRRGSEPGPDPGDCRPLLSSLTRGFPPRTPTSGLAFPSLLRVWREPALRPERAWGPPAVKTSRGPIHHGGRRRRERQEK

SEQ ID NO: 5022 - protein, 100 aa, Homo sapiens
ITLFVASASVSGWALTSHLRRGSEPGPDPGDCRPLLSSLTRGFPPRTPTSGLAFPSLLRVWREPALRPERAWGPPAVKTSRGPIHHGGRRRRERQEKDKF

SEQ ID NO: 5023 - protein, 34 aa, Homo sapiens
LEEPAGLNQGDAEDDDLLPRPLEPSACARHPRLA

SEQ ID NO: 5024 - protein, 73 aa, Homo sapiens
VHLLLLSACLLPHRRVSGHPSFSAWGPHHHPQHCRCLFFTVSFSTHPLLSSLLPAPLNLPGPASPVMLGWSKH

SEQ ID NO: 5025 - protein, 120 aa, Homo sapiens
RMSNKGKKLKRIILAIPPAAPATVAMRPVEAAPSGRQAIVVEIGIGIDGEIVGAEVQVGSVVTVAVAGIVDMVVSREVGTIVVRIVCITGVLHLPLVIGMDTVRVLISERRAQSGSQLII

SEQ ID NO: 5026 - protein, 11 aa, Homo sapiens
MRFGLILRAVV

SEQ ID NO: 5027 - protein, 76 aa, Homo sapiens
IAALSVSAAPLSGPGLRGPPAPWASAASPPPRPCWSFSTSSSGGQLAFYAMWEPMSSSLMMTMTTSLKMCTRSSLL

SEQ ID NO: 5028 - protein, 32 aa, Homo sapiens
IHHFYLLCGVLSICLPHSASAGVPAGLVLPLC

SEQ ID NO: 5029 - protein, 21 aa, Homo sapiens
TDPHSSQGPQTSVSLGSSLMT

SEQ ID NO: 5030 - protein, 54 aa, Homo sapiens
LERSRERAQAAVLIPFWPAVFRSVSTALQEWQILGSLLASLWQWSGISHPQWRL

SEQ ID NO: 5031 - protein, 46 aa, Homo sapiens
KCLSLWSLLSPAACRLSLCMTGMDSEFCSTSPRREPLGTQRYRCCS

SEQ ID NO: 5032 - protein, 26 aa, Homo sapiens
MTFFGCLWLCRAVWTKERSSLGLAVL

SEQ ID NO: 5033 - protein, 15 aa, Homo sapiens
IQLRILLSRSLFYLL

SEQ ID NO: 5034 - protein, 33 aa, Homo sapiens
IFHLTPSAKPPGPLVHPWWPLCLLCSVLPMAQT

SEQ ID NO: 5035 - protein, 74 aa, Homo sapiens
TAAVPAAATVVAVPAAAAAATGAAAPAAAAAPAADTAAAAPAEATSPPLPGPWASLHLRDQGQQKLAGILTKPE

SEQ ID NO: 5036 - protein, 38 aa, Homo sapiens
TLGVFLRPKPWLCHFLLAGLHYCVFVRPGVCPGHNQSS

SEQ ID NO: 5037 - protein, 38 aa, Homo sapiens
VAAAAAAGAAWIGALSCGISSRCSSATRSGGWTCWTDM

SEQ ID NO: 5038 - protein, 19 aa, Homo sapiens
LITLLSFLPVLCWQGRVPK

SEQ ID NO: 5039 - protein, 34 aa, Homo sapiens
MLARMFNNFCLQAIFPPGPPQVLSLQASATTPSL

SEQ ID NO: 5040 - protein, 32 aa, Homo sapiens
RRITLTWSSSIALLSTILWPRPMALHGCTGWG

SEQ ID NO: 5041 - protein, 51 aa, Homo sapiens
MMPIGRKPSGPPWMSATILTLTARTASTTLTTGTAAATPTTRWTGEKVQGQ

SEQ ID NO: 5042 - protein, 34 aa, Homo sapiens
MNLTGLSSALCGHSSATQSPRESPAAPRAPGPSQ

SEQ ID NO: 5043 - protein, 34 aa, Homo sapiens
VSLFLLKPLSLTVPANRSGRPQHTRRTDTGSKLH

SEQ ID NO: 5044 - protein, 54 aa, Homo sapiens
IFSPRSSPQGCASSSTSRSALSSTTQGRSCSTPSWTPCLCAVLWTSLLALTIPS

SEQ ID NO: 5045 - protein, 89 aa, Homo sapiens
MRLRSRSQGQRRRTGPLQCPVMIQPLQRPPAATPAACAGAAAVAAPGTKSGGARGRPPGRASCSPSPAVKYVPRQVLRRCRAGRSLLTS

SEQ ID NO: 5046 - protein, 44 aa, Homo sapiens
TATPPLPSLRPFFLSLFSFFLPLLAATAQDRRPGDELGAAARVY

SEQ ID NO: 5047 - protein, 21 aa, Homo sapiens
ILNVQRVFLLCFPGWSAMVPS

SEQ ID NO: 5048 - protein, 51 aa, Homo sapiens
MRLQMCLPKSTASRVRRRAGWPRRRRSCVLGARSSTWTPPRVSSISLSTSC

SEQ ID NO: 5049 - protein, 25 aa, Homo sapiens
LLAEAAESVRLQVGSRGRDVSGVGC

SEQ ID NO: 5050 - protein, 18 aa, Homo sapiens
LAWVWEQQLLWLGLPAVW

SEQ ID NO: 5051 - protein, 35 aa, Homo sapiens
LWLTLLMYYLYPSGFTITSATTGLSREPFACSAST

SEQ ID NO: 5052 - protein, 13 aa, Homo sapiens
MILIHALNIMLAG

SEQ ID NO: 5053 - protein, 46 aa, Homo sapiens
IWQRILHLSLLPVITKWLLLSTTAKPCERLQTAHHFCPVSVNTFCS

SEQ ID NO: 5054 - protein, 66 aa, Homo sapiens
MPMATALPLDFPTFLLLARATNHGFLFPEERVSASPLLKRETKDWRPNRAVGEMGPWVTCQIFVRN

SEQ ID NO: 5055 - protein, 17 aa, Homo sapiens
KELGLISAIILLWKLKY

SEQ ID NO: 5056 - protein, 19 aa, Homo sapiens
LACILNLKLIITTLALELL

SEQ ID NO: 5057 - protein, 20 aa, Homo sapiens
ITSPPSRWAMCLSSWALLSW

SEQ ID NO: 5058 - protein, 25 aa, Homo sapiens
RFGLVVPLRAAAAISVVGPEVYADL

SEQ ID NO: 5059 - protein, 79 aa, Homo sapiens
LPGPASTLLLFYHAAFLLEPEQLPEKRRTSKAFWNSPRRSGWRVPLKWTGPTISQSWPFTSCPLSSGEPHVWKSCGGCW

SEQ ID NO: 5060 - protein, 13 aa, Homo sapiens
MSWTCSGWLISMF

SEQ ID NO: 5061 - protein, 28 aa, Homo sapiens
RQRVLILCGTASAFVLCPPRPRRPFEAA

SEQ ID NO: 5062 - protein, 48 aa, Homo sapiens
MHYGGKNEKEEIKKLNRMMARLILVTLSSVSPTRLTRGMNSPTGSRTL

SEQ ID NO: 5063 - protein, 24 aa, Homo sapiens
MMRAWLTATSASQLQVILLPQPPE

SEQ ID NO: 5064 - protein, 17 aa, Homo sapiens
MLPLTSSLSMKLILLSW

SEQ ID NO: 5065 - protein, 25 aa, Homo sapiens
KVSGAAQLCLSLYLCEGREWAEQNF

SEQ ID NO: 5066 - protein, 25 aa, Homo sapiens
IAVRRRSRWWDLTVGPISLFSALLA

SEQ ID NO: 5067 - protein, 41 aa, Homo sapiens
MKGLFLLTTNVSVPGLLPGSSVLPKILMRTLWRETSELLFL

SEQ ID NO: 5068 - protein, 65 aa, Homo sapiens
IGGDSRGSGGDSPASGGGRRHQRQCRDRIRAALRYLSLSLLPPYLARSLARSLRGSLSSSGRRRV

SEQ ID NO: 5069 - protein, 34 aa, Homo sapiens
LGQSLVIHLLLVFFQSLLVTGWEALLKIPTKTGS

SEQ ID NO: 5070 - protein, 58 aa, Homo sapiens
TFPSALFSPGRAAAAAAAAAAAGGGARWRRWPGSPWRTVKEAAKKKSATTTTPIHLLT

SEQ ID NO: 5071 - protein, 107 aa, Homo sapiens
MTPLLLTPQSAVPLPSLGRASREPGVAFQLVSRFSPGLGGGSLRGAGRSFACGVNARSTCSFSSRPLRASPVSPRRAAAAAAAAERGGGGGSPRRRQQLQRNGGDRG

SEQ ID NO: 5072 - protein, 72 aa, Homo sapiens
LPSVFPSVLILSPSALLCVPPLPLHFLSSHPQSHPRAVSLSGASPSCSLSPVLPTLTSRRPWPPSQTGSYSC

SEQ ID NO: 5073 - protein, 49 aa, Homo sapiens
ILSVSAALVTLWRWGASWGCAPWRAGYHVCVEVPRVCYADAVLVETTPL

SEQ ID NO: 5074 - protein, 52 aa, Homo sapiens
VCVWLWVSCAVLLEHRGKAVDAGSQLAETCRPWSLMIVPVPLWRSLTAWRCW

SEQ ID NO: 5075 - protein, 26 aa, Homo sapiens
IKGRTLLAGVCWTLSFHLLTKRIPIP

SEQ ID NO: 5076 - protein, 21 aa, Homo sapiens
LSETCLLLWPLVLSCSPAWCV

SEQ ID NO: 5077 - protein, 51 aa, Homo sapiens
VALSGSNKSKLWVCECLCVLLFTSHLLKSVYVRGWGVCVKESEEEKEREIN

SEQ ID NO: 5078 - protein, 14 aa, Homo sapiens
KSLLLMIFLDTILI

SEQ ID NO: 5079 - protein, 30 aa, Homo sapiens
VGSSARRQGWRGLCAPTSAAAWLCWPSCPP

SEQ ID NO: 5080 - protein, 55 aa, Homo sapiens
TPTAPLRAGWAAGSRLQRWVDLGSGFQHVAALGLPLLPAGVGQCPEQALFPSPVG

SEQ ID NO: 5081 - protein, 112 aa, Homo sapiens
MLFAAVRTGLSARPRRSLASSLRAPGRPSPGRAEEGADFGFASRSLLCPGASQGRRLEASGRGETYPCVYPPHALPPSFPVLEPWPGKPRQGKRTVAALLERDHLQTPTKVK

SEQ ID NO: 5082 - protein, 29 aa, Homo sapiens
RVSVVLVGLLVLLVLLKDRCSGKLGGLSH

SEQ ID NO: 5083 - protein, 87 aa, Homo sapiens
VEGLDCLSLLTFIFPLCWMPPALKHQTPGSSAFGLLDLPPEWFARGSQAFGYRLRAALSAFLLLRFWDFTGFLAPQLADGLLWDLTL

SEQ ID NO: 5084 - protein, 25 aa, Homo sapiens
MVLLMVWVVMAVVVEAVEVTMGKAA

SEQ ID NO: 5085 - protein, 62 aa, Homo sapiens
ICFATAWRQKIFQRLKTEMKTQVPKMKGSLLLCSLMSHMEGSPPAPQLSGTCWKGSFWNTSS

SEQ ID NO: 5086 - protein, 22 aa, Homo sapiens
MTTLGLLTGICPQTARTWVNMD

SEQ ID NO: 5087 - protein, 36 aa, Homo sapiens
RACSLFSAGVAGSEGSWSAFCRSLWLHAHRLRGYLP

SEQ ID NO: 5088 - protein, 59 aa, Homo sapiens
KRKQEAFAVIPATALANAVPASVASAPRTAQHLPLSPRRPPAASGAPVWFPKKDLQQNE

SEQ ID NO: 5089 - protein, 28 aa, Homo sapiens
LSWLKGLKCFLPWVLWLPSPSVLALWPN

SEQ ID NO: 5090 - protein, 25 aa, Homo sapiens
MARKCSVPLVMAWLTWTTSRAPLPH

SEQ ID NO: 5091 - protein, 41 aa, Homo sapiens
MAAYFAVWASVPSPASICCGTCSQGWCGTNASRHHGRVWTK

SEQ ID NO: 5092 - protein, 99 aa, Homo sapiens
LLAVTGGAAALSALSPPGENEPQCPPARSQPCPGQRKTTRIPGSGRRPGWAAPVRAGDSAPPLAAVSGNWVPALRGFQRTGTPFPGSPAHPAGEGGRCR

SEQ ID NO: 5093 - protein, 30 aa, Homo sapiens
LKKPQSHMWRRMTMMSWTASSIISLHHRSP

SEQ ID NO: 5094 - protein, 87 aa, Homo sapiens
KQQPLLFVSAISSAVAKQQPCVSASPSTLARLVSRLAMPAGSSTAWNTASSPMARCQVTRPLGEEMIPSTPSSVRRGLASMCPGQCL

SEQ ID NO: 5095 - protein, 45 aa, Homo sapiens
KLGCGVIPVCLLPAFLGFFRRRGASLRNSRPLRATALAVSFASSS

SEQ ID NO: 5096 - protein, 40 aa, Homo sapiens
VATGWEWLRGYLLLAACQREEGGGKKKGGGVEGGGPGPGE

SEQ ID NO: 5097 - protein, 65 aa, Homo sapiens
LGRRRPASTSGLLPSAACAPPAKSPPSRPHLAPPIPPGWSPLWVPIGSCECLGVGSLFLARGTNF

SEQ ID NO: 5098 - protein, 47 aa, Homo sapiens
LFCHSIKLFSILLSLHLSAIPHLPGRRTRTQDPPGGLTFRRGASWTA

SEQ ID NO: 5099 - protein, 40 aa, Homo sapiens
MIVTGGIAVPTAALTWPTTTTSSPSPSRAVRGVPTSSTQW

SEQ ID NO: 5100 - protein, 23 aa, Homo sapiens
KEVAGSLCVLQIVTLMVAPVFHD

SEQ ID NO: 5101 - protein, 46 aa, Homo sapiens
TPPPRTRSLAPAAARPQDNGSILLGSAIVSSAGPGSSCKPLTFVPW

SEQ ID NO: 5102 - protein, 23 aa, Homo sapiens
MILLVSLHLWTVSIKTVEIINLR

SEQ ID NO: 5103 - protein, 93 aa, Homo sapiens
MRRGGRVPGGSSRRRWRWRAAAAETGALSRTPRPAPRRHPRRSVLFPLCFSPVLGQSCPRSRVGLRVCAGAAGAISPLGGRWSPGARGRDHGG

SEQ ID NO: 5104 - protein, 79 aa, Homo sapiens
LFFRRSAVAFLCRSQWKKRSPRWSLTMAPACAKLVLLGTTLPEPCFLPSSGAPDTRASWWAWARRTPTWATRPRASVAS

SEQ ID NO: 5105 - protein, 33 aa, Homo sapiens
MEPKTKMTEITSNSSQTFLVATLGILRFSLACP

SEQ ID NO: 5106 - protein, 36 aa, Homo sapiens
LRGTRSLLRSFCLSIACAVSWTAHGSSAGDAGISGS

SEQ ID NO: 5107 - protein, 24 aa, Homo sapiens
VVLPPGLTSLWFVCLCSASSGAAC

SEQ ID NO: 5108 - protein, 14 aa, Homo sapiens
MAFLSWLTTFTPWA

SEQ ID NO: 5109 - protein, 66 aa, Homo sapiens
TQSLGLFGLLPPPGSALRCRGELSARSPWGAPHIGPRCCCCCRLCCCCCCCASRPAAASQDRETHH

SEQ ID NO: 5110 - protein, 69 aa, Homo sapiens
TQSLGLFGLLPPPGSALRCRGELSARSPWGAPHIGPRCCCCCRLCCCCCCCASRPAAASQIPRGAPPSR

SEQ ID NO: 5111 - protein, 37 aa, Homo sapiens
IGPMQTWFQKFVFFWWVQLGLESPVFSIQSSLFFMAM

SEQ ID NO: 5112 - protein, 40 aa, Homo sapiens
KVLLAGYFIDTLKVLHMIRKQLWKMTAFISLNILPYGTDQ

SEQ ID NO: 5113 - protein, 25 aa, Homo sapiens
MNLCWKIITLLWVSNCCKKNTVTSS

SEQ ID NO: 5114 - protein, 49 aa, Homo sapiens
LLHLRPEPRSAQDWNAFPSGLSWSLGLGAALLRYNSCACGFGWHNLCLG

SEQ ID NO: 5115 - protein, 24 aa, Homo sapiens
MSCFSSTCSFGSVAAAFWALGSTC

SEQ ID NO: 5116 - protein, 32 aa, Homo sapiens
MAWIMLVILNWPRIRPRNLKRRSWNCISHTGP

SEQ ID NO: 5117 - protein, 20 aa, Homo sapiens
IKTVMLTFFLMIITVLNSLR

SEQ ID NO: 5118 - protein, 24 aa, Homo sapiens
IGRAVTVVCPGAAGAAAAAGHGAR

SEQ ID NO: 5119 - protein, 75 aa, Homo sapiens
LVLLAFRALVLLDLLGLLDLLASLVRLESEAPRGTLDQMDHRGPQDPLGNLVAREPSRVWKAVRISCVQPTVHPE

SEQ ID NO: 5120 - protein, 11 aa, Homo sapiens
LLNILLFSSAI

SEQ ID NO: 5121 - protein, 21 aa, Homo sapiens
ISKNHGKLKSLLGLLKHLLLM

SEQ ID NO: 5122 - protein, 12 aa, Homo sapiens
MLGLFQSALTLV

SEQ ID NO: 5123 - protein, 32 aa, Homo sapiens
MVIMKRWLPWRPKSVIKLSIILATSICHGTSF

SEQ ID NO: 5124 - protein, 13 aa, Homo sapiens
LCILLVLLRLQRQ

SEQ ID NO: 5125 - protein, 34 aa, Homo sapiens
LCILLVLLRLQRNCLLFGLEKRLWRHGNKQQRPA

SEQ ID NO: 5126 - protein, 58 aa, Homo sapiens
REKCPHLLLSSSLTPSHPLASDPFSTGDLPLLRSSSSSFTSPPSSSLALIMLMLEENE

SEQ ID NO: 5127 - protein, 20 aa, Homo sapiens
LILLVVLLTGELNMYLQESG

SEQ ID NO: 5128 - protein, 38 aa, Homo sapiens
LVYSYHLASVFLGNAAVLMHLVSFWSYSGQAFVTALWD

SEQ ID NO: 5129 - protein, 46 aa, Homo sapiens
IDDTIFHVLLKQGVGKSILRGHFHHQFSFFFLVVALFWGGWVCWFH

SEQ ID NO: 5130 - protein, 8 aa, Homo sapiens
MAILILLT

SEQ ID NO: 5131 - protein, 27 aa, Homo sapiens
VWWSCCLVILSTTRWQASLIRPAHTSE

SEQ ID NO: 5132 - protein, 35 aa, Homo sapiens
MTLTENLKKSVRVLKLSVGPKKCPISSLTLELRTF

SEQ ID NO: 5133 - protein, 19 aa, Homo sapiens
IRLLCLVTAMVSARAAQDL

SEQ ID NO: 5134 - protein, 25 aa, Homo sapiens
LKTSMMTCMCSFLVLIQKIIHKSHS

SEQ ID NO: 5135 - protein, 10 aa, Homo sapiens
IYSGYLFLLY

SEQ ID NO: 5136 - protein, 18 aa, Homo sapiens
LVFVLSLVYWIQRFHCFH

SEQ ID NO: 5137 - protein, 14 aa, Homo sapiens
ILTATWSSILLCCF

SEQ ID NO: 5138 - protein, 14 aa, Homo sapiens
IKIRSCLFILYKMI

SEQ ID NO: 5139 - protein, 29 aa, Homo sapiens
ICAFFFIVLFVHFIQLFVQNAKNLDTLHQ

SEQ ID NO: 5140 - protein, 41 aa, Homo sapiens
RLVVTWMIVPVMLKPLIDLITTGFSQDYKNFLKVTTLGITR

SEQ ID NO: 5141 - protein, 39 aa, Homo sapiens
LSNFLFLVWLLWCAKLRTLLFCHTATPYRCGRCEICHQL

SEQ ID NO: 5142 - protein, 40 aa, Homo sapiens
MRPHKPKKKTSICSSICLLWFKNFFNLTSRCVNCDIWECL

SEQ ID NO: 5143 - protein, 59 aa, Homo sapiens
LVRTPLTSVYLRVRPILPAGLCLGVTLPELAPTTVATVMLMCDCCQEPAHMTVWRKFFP

SEQ ID NO: 5144 - protein, 27 aa, Homo sapiens
TCLCLSFLSSVSTGYVSHCQIPDHKSP

SEQ ID NO: 5145 - protein, 12 aa, Homo sapiens
KCSFLTFLLQLV

SEQ ID NO: 5146 - protein, 41 aa, Homo sapiens
KEDDSTSFSFLPSLPCPALLPLLAVVVCQHLAGDFLNLQGE

SEQ ID NO: 5147 - protein, 115 aa, Homo sapiens [sequence omitted]

SEQ ID NO: 5148 - protein, 52 aa, Homo sapiens
VYHTWADTSLSSIFTKQRTRRFPRRCRWMAGGHGQAPSMPLFAPMCLAAGIK

SEQ ID NO: 5149 - protein, 11 aa, Homo sapiens
VAGAAFFMSLG

SEQ ID NO: 5150 - protein, 28 aa, Homo sapiens
LVLAAASLCCAHMTHNSGSGPGTSNIIK

SEQ ID NO: 5151 - protein, 48 aa, Homo sapiens
LAASLTGAFLTAAHGPHWSPPTASRILPPPSQAGLMSVLTLLPLLPGP

SEQ ID NO: 5152 - protein, 13 aa, Homo sapiens
MYTHTYILIWVSV

SEQ ID NO: 5153 - protein, 22 aa, Homo sapiens
LIVYIHIFWIRTPQLPILALSE

SEQ ID NO: 5154 - protein, 46 aa, Homo sapiens
METFEIFYLKCIRVNLISRQLNTFFLAVLLVVCMPCFHSVCTGKRT

SEQ ID NO: 5155 - protein, 37 aa, Homo sapiens
LGKHLLSILGTNMLLFPLFLLLSLDLCQKEGYAESLI

SEQ ID NO: 5156 - protein, 68 aa, Homo sapiens
LTSIPSKNKRPSETERGGLGLGSRPRCVLKVMCARFRKAAHSRFLGVSAAVGSWGQGPGCWGVGRGSR

SEQ ID NO: 5157 - protein, 161 aa, Homo sapiens [sequence omitted]

SEQ ID NO: 5158 - protein, 85 aa, Homo sapiens
MRECSSDAVTWAGALGLASALVAARPALWSHGLPGRTPRLSPSRPQPPDDPLLPSLSPTVGLAEDGARPGPRGAAQVLGGREPGA

SEQ ID NO: 5159 - protein, 58 aa, Homo sapiens
VGPLLARAWTLAALLLDSHHEAPMLARSLAARRPGAKDTAVSPVPRISPPPKAHPRAF

SEQ ID NO: 5160 - protein, 50 aa, Homo sapiens
LGPRHPKPRDTCWRADGICLAWAGVLALLLLSCRATSDDRLFPLSLSFSS

SEQ ID NO: 5161 - protein, 23 aa, Homo sapiens
MEMYYSLLYLYLYHSAGLTELSL

SEQ ID NO: 5162 - protein, 43 aa, Homo sapiens
VPHVVAVLRGLLLLFLCAKDDVGGGAGSLRRCQRAPGDRWGPG

SEQ ID NO: 5163 - protein, 14 aa, Homo sapiens
MICIYSFVILPAIY

SEQ ID NO: 5164 - protein, 32 aa, Homo sapiens
LTHLLLCWIRASSGLLLSSPRSLMDSTFPTGP

SEQ ID NO: 5165 - protein, 114 aa, Homo sapiens [sequence omitted]

SEQ ID NO: 5166 - protein, 60 aa, Homo sapiens
MTAFGLGIPTFLVMQPSGSQPRFPALTQNGVALVRTPLTSVYLRVRRPDFAMLARLVLNS

SEQ ID NO: 5167 - protein, 47 aa, Homo sapiens
IGSFFFLPSLFLFLRLVACKKITVRCSPALGARYSAPLSPVHCATQR

SEQ ID NO: 5168 - protein, 164 aa, Homo sapiens
MKRVFWCLGTTILPPTLDIRGGPSHPCPPMLSLPTLGPLTHSPLSSPPPTVSQGTPMAPAPTPKGATHRVPTPKGATHRAPTHKRATHRAPTPKGATPRGHIPRAPSPPTPMDSHRSSQDKTLTHPSMETTRRRVPHPTMTTRTSLPPTGMTRASDRPSSARCS

SEQ ID NO: 5169 - protein, 24 aa, Homo sapiens
LCSLGMLLCLCIWSLFGATVDRHL

SEQ ID NO: 5170 - protein, 36 aa, Homo sapiens
TRKRRRKRKKRKMLGNIYLTCSTARTLASCCYSCKY

SEQ ID NO: 5171 - protein, 36 aa, Homo sapiens
RRWLFGGSEERLLLLLLLLVAPLQKSSKNSAVGSVR

SEQ ID NO: 5172 - protein, 33 aa, Homo sapiens
RRRKRKKRKMLGNIYLTCSTARTLASCCYSCKY

SEQ ID NO: 5173 - protein, 27 aa, Homo sapiens
LLPPPLLLLLAPSLHQPEALCFPSWIC

SEQ ID NO: 5174 - protein, 64 aa, Homo sapiens
LLLLFMSVPVVSAPPFCPPAEGSRDGRPKASVARPAAVHEHHSPRDCGHLPDVLRSSLGGWQPH

SEQ ID NO: 5175 - protein, 44 aa, Homo sapiens
LPVALTATLASGAGHGRPPPDRPAPVLTALALAFEPEASSARTT

SEQ ID NO: 5176 - protein, 32 aa, Homo sapiens
MGLCWMRVLLTQVYTSISGQQKRRMTQAWCIK

SEQ ID NO: 5177 - protein, 9 aa, Homo sapiens
MFLCVLHLL

SEQ ID NO: 5178 - protein, 43 aa, Homo sapiens
KRKLLMLKMYHLSFQHLTTTSSVSTGISSSLYLSYRPKCHLSL

SEQ ID NO: 5179 - protein, 19 aa, Homo sapiens
LGTRRQETLFLLSSFLLVG

SEQ ID NO: 5180 - protein, 54 aa, Homo sapiens
VTAGGAGPGAQRGGLWRSEGRRCFVAWTLVSALEQAGAWSAAGPPWSPRWARAS

SEQ ID NO: 5181 - protein, 123 aa, Homo sapiens
MGQRGAVGPPAALGVEGGAAPAPLTLACPSSRYFLDSTSETSLMPKTWISWAEIRSHTSSLSMSHPSLCCRISPTFASRSLIPLRYPSKSTSKNVSTSSTAAALMGGTALCTALQASLAAPRL

SEQ ID NO: 5182 - protein, 55 aa, Homo sapiens
MSQELPAAGHTTAFICALGPGLLLSLPSIGAQHPLPAHPSDSNSSPAPRPCVHFS

SEQ ID NO: 5183 - protein, 29 aa, Homo sapiens
LVRDAVSCVIPVIALQALSPSTWSLCPGR

SEQ ID NO: 5184 - protein, 53 aa, Homo sapiens
LGPALLLAPRSLPGHRLTRCLLLGETSFLPATAAASATGHRPCPGSPLAQTPT

SEQ ID NO: 5185 - protein, 48 aa, Homo sapiens
LLLLTSALRLFSIGVEAPPVLSCLWREANLPLDQREEKAETGSNAVDW

SEQ ID NO: 5186 - protein, 54 aa, Homo sapiens
MAPESGGSVASLSLSVADAMVSCLSSWSGLDQCLPGRQVRSWEVPAVLHAELPL

SEQ ID NO: 5187 - protein, 32 aa, Homo sapiens
LPSFVVSQRCAGLLLAALRIQGVGCQVQDLQL

SEQ ID NO: 5188 - protein, 32 aa, Homo sapiens
MIVFLLQVLLMFKIACQLLSHEFSNKKMKSLC

SEQ ID NO: 5189 - protein, 73 aa, Homo sapiens [sequence omitted]

SEQ ID NO: 5190 - protein, 15 aa, Homo sapiens
ISRALAELHLLAFLA

SEQ ID NO: 5191 - protein, 52 aa, Homo sapiens
RRSATAATIYRSSDSSRSDVPTVPATGRLWCTAAAGSTSAASTVWYSVFSKL

SEQ ID NO: 5192 - protein, 21 aa, Homo sapiens
VLPFLFSAARKFSLLYMCLCA

SEQ ID NO: 5193 - protein, 36 aa, Homo sapiens
IPCFCCCCWLLLFLLLLFSMSVVVRRKHQLQRVQSS

SEQ ID NO: 5194 - protein, 129 aa, Homo sapiens
RMSEHRNEALGNYLEMRLKSSFLRGLGSWKSNPLRLGGWTILLTLTMGQGEPGGPQGDPWVPHELLLPSLCDSSHASSWGSGSITCAWRGGDSSSHPLVSGHILSNSPVAAVMCSSMGTHLSPFKGTLL

SEQ ID NO: 5195 - protein, 31 aa, Homo sapiens
IVISRLALARAAAAAAAAAAAGAARKPVAVT

SEQ ID NO: 5196 - protein, 114 aa, Homo sapiens
VASCKESLRGPKSAALLLAFASSSSRFPTVKSQRHLQRPPGPTETDPQRLARSCLLHREPPSTGEGLAGGVGRWRRRHGEVPEGRPGRCRSYVTLPLLHGPVSVRRWETRRPNP

SEQ ID NO: 5197 - protein, 25 aa, Homo sapiens
MPGPVHIALLASLNPHSFSLGSLWV

SEQ ID NO: 5198 - protein, 56 aa, Homo sapiens
MWVQPWEHCGSASQEPWRSRSLKTQWWHWWAPMPPCAAPSPLSLASAWHSSTSSGS

SEQ ID NO: 5199 - protein, 35 aa, Homo sapiens
MHARKIGLDLITALSPLVSLCQIFSAPFHTGIFFS

SEQ ID NO: 5200 - protein, 12 aa, Homo sapiens
MFYEMHVWLLIF

SEQ ID NO: 5201 - protein, 29 aa, Homo sapiens
ILFLSPQLLLTRRPPAASATPPGRFHRIS

SEQ ID NO: 5202 - protein, 16 aa, Homo sapiens
IFTKFFIFFVNCWGWT

SEQ ID NO: 5203 - protein, 57 aa, Homo sapiens
VGSNPMAASRGGCLQLLQPQWACVTCALLVLLSVGSLCSSAQLDPLPYCKDRGLSVS

SEQ ID NO: 5204 - protein, 63 aa, Homo sapiens
IFIFILVFLLLFSSFVFFFSLETGSSYVGQAGLESPGSSDPPASASGKVGLQARIAAPGQSLF

SEQ ID NO: 5205 - protein, 73 aa, Homo sapiens
TVRFLPSAAGRVGSPWFRPAPPSWSPFSRWAGLSGGDCLPGLAIGLLMMFDPAAGIAGNVISKLGSASVSSLV

SEQ ID NO: 5206 - protein, 46 aa, Homo sapiens
LPPALTLPLVCCSSRSAGPETLQQGCGLLVHRRHHLHIALWIPPIL

SEQ ID NO: 5207 - protein, 50 aa, Homo sapiens
LVRNFLFLPSLRLQCLMGLPVGGSVFAVPGRSGEPWEEVLRRPSLGSPQD

SEQ ID NO: 5208 - protein, 30 aa, Homo sapiens
LAGSLAAAPQSAAAAAACGPGGWEKRSVGN

SEQ ID NO: 5209 - protein, 34 aa, Homo sapiens
MAMLMLSMVSLLQTFIYTLREKNVSAVTGSCFGG

SEQ ID NO: 5210 - protein, 59 aa, Homo sapiens
MAFMLLILNTASVGKEAFVFDLSIRGSSHRNARGKRTLPYSHLMLQTMFMVIHTFQNEP

SEQ ID NO: 5211 - protein, 46 aa, Homo sapiens
LGLTCLFLLLATSQSQDGCCDSGSCPNSRQQEGHGAAPASSCLPIP

SEQ ID NO: 5212 - protein, 27 aa, Homo sapiens
LLLFLLLLFSMSVVVRRKHQLQRVQSS

SEQ ID NO: 5213 - protein, 28 aa, Homo sapiens
RTIFLGMLVLEASGPRSVFGLIDPRFSG

SEQ ID NO: 5214 - protein, 114 aa, Homo sapiens
ILSSRLGTPGSLTAAAAASASRTIGSLGNNSGGRPQRGSGSPCLRGSGDSSRPPPPGRTASVVPACNASAGEWLLLCPSWGPSQDQSANSIPPAGRSRGAGTKPAASSRADPGT

SEQ ID NO: 5215 - protein, 83 aa, Homo sapiens
RTKSHGHADRVPRETVSVGMCAWLCTWVCSARESTWRLLGAMFGEGGVPAAWRASVPVAPCPGTAACTSRAAFGGWGFCHFRV

SEQ ID NO: 5216 - protein, 65 aa, Homo sapiens
LEPARRSGRPRLCPLLLLTARARGTSSRGCFGCRGRWSLWILHGTSWLWPSPARPCFPFLTSRTI

SEQ ID NO: 5217 - protein, 48 aa, Homo sapiens
IWWVYQGFLLLLLPQFLLLPPCKKDLLPPTMILSPPQPRGTISGGFFK

SEQ ID NO: 5218 - protein, 29 aa, Homo sapiens
KSKAKSQGSPWLMYLGLLWSTLPSCHPVE

SEQ ID NO: 5219 - protein, 54 aa, Homo sapiens
RTKSMTSRWRSRICGWRTMGVTAVRSLTGWRMKAVWWSWSCGDGAVCPHISPTC

SEQ ID NO: 5220 - protein, 178 aa, Homo sapiens
RRLVGLAGLSDAARVAVCELRVDCVVTGVPLSRPVAGERGCVVRGGGGTNAVRAGRPPQGPWPPARASTSRTPRSTCGTSSSWTGPRAAPVQRAHGHPVPTMGTSMDFWSQTRSAQVIVPQQTRLVFGPCHPLTCKRSRSSVSQEMIAPPALGFWPRRWRLWLAVTLAFQARPGEATR

SEQ ID NO: 5221 - protein, 34 aa, Homo sapiens
MRLTACGSWSCVRSVRSLSPRKPWRSTASLSTSR

SEQ ID NO: 5222 - protein, 53 aa, Homo sapiens
KRSPRWSLTMAPACAKLVLLGTTLPEPCFLPSSGAPDTRTPTWATRPRASVAS

SEQ ID NO: 5223 - protein, 30 aa, Homo sapiens
LRRLDLLVLTHLTSTIQQAAMTPQLSLPLT

SEQ ID NO: 5224 - protein, 28 aa, Homo sapiens
MAALRALLLWAPGAGGTPRMRTLRMCSA

SEQ ID NO: 5225 - protein, 81 aa, Homo sapiens
LKLSFSTLLILCFCWSAYHLMASKTNAKFLSDYAALPILKTLAESLAPFKGLIINCLSGRPPMRLHLCGYTLLVWTLSKFR

SEQ ID NO: 5226 - protein, 46 aa, Homo sapiens
MKESSVFLSLFRTSRGFVFCETVFLYSCSNDRVTCTVVLLPECTDV

SEQ ID NO: 5227 - protein, 140 aa, Homo sapiens
LLSPASLLRLSCSSAAFVSGPRPSSPPAQRSPRARQEAAFRWPAAAATSAQFLPLASLPNGRSSPAGRPGCDRERPILSRSRSERPAATPRDHTPAALGPARLPSPPAVAPRPLHDDATPLLQAADPTGPRPRRKMATAA

SEQ ID NO: 5228 - protein, 40 aa, Homo sapiens
MRHILLPPCTSASRTSLGRAWPKASYQQHHQGTLELSCQN

SEQ ID NO: 5229 - protein, 40 aa, Homo sapiens
LSQAWVCVSFLFLLSLLIALTNLLGSLLELTWCWIFSNCI

SEQ ID NO: 5230 - protein, 9 aa, Homo sapiens
MVLFFLKLW

SEQ ID NO: 5231 - protein, 52 aa, Homo sapiens
LSLCSKTVNSLLSLLHLFHSFSHCVTALQRPGSWRGTLGVASLLFAYTEKAM

SEQ ID NO: 5232 - protein, 16 aa, Homo sapiens
LGLAEVEDLLLSRPRN

SEQ ID NO: 5233 - protein, 29 aa, Homo sapiens
MAMRWARACRVGLLGGSGARPGGYPPLPA

SEQ ID NO: 5234 - protein, 134 aa, Homo sapiens [sequence omitted]

SEQ ID NO: 5235 - protein, 35 aa, Homo sapiens
LGSAHHAPLMFAVWRALSLAVETSVTLGRVYFFDG

SEQ ID NO: 5236 - protein, 64 aa, Homo sapiens
LRQKTSAAFSMGCSTFFIAHPGNSQASSICILAAACTLGDSGATVWDRAHWQGTGGCWQASGHG

SEQ ID NO: 5237 - protein, 25 aa, Homo sapiens
MGLRKPPGSLLLGFLLFCACISVDS

SEQ ID NO: 5238 - protein, 17 aa, Homo sapiens
LPVELVFLFLYNVCTLN

SEQ ID NO: 5239 - protein, 24 aa, Homo sapiens
MQHRRLPFSVVLLPQFVESGVSMQ

SEQ ID NO: 5240 - protein, 37 aa, Homo sapiens [sequence omitted]

SEQ ID NO: 5241 - protein, 107 aa, Homo sapiens
LSGQPLESLGAALLLTSHTFASSLCSQLEGHECPWAVVSGRGPDTATLLPGGRGADACLILPEDGATGGCGIRAPCPALCLPAQAGHSAGRPPSAAHRGQPCGQEPL

SEQ ID NO: 5242 - protein, 29 aa, Homo sapiens
LIWKTLLNFCYQLHSVMLTLPVHSMVVRS

SEQ ID NO: 5243 - protein, 54 aa, Homo sapiens
MASLMSWEPVLLGKVTSDLMGAQMCVCLSVCLCVCVHSRPLTASKPGVASRPCH

SEQ ID NO: 5244 - protein, 57 aa, Homo sapiens
LGLLLLALLLPVQVSSFVPLTSMPEATAAETTKPSNSALQPTAGLLVVLLALLHLYH

SEQ ID NO: 5245 - protein, 98 aa, Homo sapiens
VCACARVCVLGVCVLGVCRGAERRAGPRGRKEAVELPGLGLRLPSSALLPVRSDAAAAVALSAPRWGRGAQAGSSENPLRRLPVPAGLRMPGRLICTY

SEQ ID NO: 5246 - protein, 19 aa, Homo sapiens
RDRAVHELQAVLLALVLGR

SEQ ID NO: 5247 - protein, 12 aa, Homo sapiens
IKISFTVMLLLT

SEQ ID NO: 5248 - protein, 24 aa, Homo sapiens
MLAVAGAVIFISSFLKHRSRNGSK

SEQ ID NO: 5249 - protein, 12 aa, Homo sapiens
IIVVVLNLALRA

SEQ ID NO: 5250 - protein, 33 aa, Homo sapiens
IFFLSSSFLTTLIVGRSKCSFILVLVQVQELKT

SEQ ID NO: 5251 - protein, 33 aa, Homo sapiens
MNKARNSCLFSVLPLLLSLTTSVNITSQLLLQL

SEQ ID NO: 5252 - protein, 24 aa, Homo sapiens
LSQKIFLSLLLQSQLRLGTSTAEW

SEQ ID NO: 5253 - protein, 71 aa, Homo sapiens
LDRLLHIRPRNGPLEKGFFKPAALSSVLASGIAFPGNLASDIAHHPALFTVPGSSWRNDISENADSYVHVI

SEQ ID NO: 5254 - protein, 41 aa, Homo sapiens
IFLWLLTGSYYKALCMDTIFLYYTRKECTYHTQGEKCSFGC

SEQ ID NO: 5255 - protein, 16 aa, Homo sapiens
VSFISVTLMCLVYSRQ

SEQ ID NO: 5256 - protein, 26 aa, Homo sapiens
IVYLPLLLLSYNAWKQEMGSAAANRT

SEQ ID NO: 5257 - protein, 19 aa, Homo sapiens
LWGSLCPLLFHCFQLVVVG

SEQ ID NO: 5258 - protein, 24 aa, Homo sapiens
MLWRLCCFALSTAYSSGPHCFYEL

SEQ ID NO: 5259 - protein, 36 aa, Homo sapiens
MCPISLFSVLPPYPSPSSAWKRTMAWTSASPDSCSP

SEQ ID NO: 5260 - protein, 54 aa, Homo sapiens
MKSIVGLGVIWIRGTSAEAVVMRNTLLFKMAIQIILNTVYLFYLDYQQRLKHEM

SEQ ID NO: 5261 - protein, 14 aa, Homo sapiens
LIFRSFSVLLSVVV

SEQ ID NO: 5262 - protein, 104 aa, Homo sapiens
VKGVGFFLCVCVCVSGEIFHYECFTKVNFFLFASFVFGSFFFLPNFGFISRRIWLWGKRKKSRITRSTTTNNNKNHQDIFLQISDGFKFMKQLSPFAISIWISE

SEQ ID NO: 5263 - protein, 62 aa, Homo sapiens
VRAVGCALSAGLGPGHAPPSPAPQAGARPRIRSSRASLGRPARNHPLRCLLFRDGEVGKRLL

SEQ ID NO: 5264 - protein, 17 aa, Homo sapiens
MGPCALLTWAVLVFKPA

SEQ ID NO: 5265 - protein, 86 aa, Homo sapiens
TRPHPAARAALSSAASALGAFSQKQSRRARWFLSARKSPELTTGRSATARGPKPQKDDGRVMKLSPGLLGRRECAGAAWERREECR

SEQ ID NO: 5266 - protein, 42 aa, Homo sapiens
LFATFISVDFFFLVCVVVVFKCGGQKEIPSQAQSNPSPKRLF

SEQ ID NO: 5267 - protein, 29 aa, Homo sapiens
LRFLVFIVVLSSHETPLEDMCLSGASALH

SEQ ID NO: 5268 - protein, 34 aa, Homo sapiens
LLGLPAAGASTLCVCLAAAVACSDWLLGPSRSEH

SEQ ID NO: 5269 - protein, 10 aa, Homo sapiens
LAALTFLLAG

SEQ ID NO: 5270 - protein, 29 aa, Homo sapiens
TAGAGALLLRGQAAAGAAAAAAARSSHAE

SEQ ID NO: 5271 - protein, 66 aa, Homo sapiens
ILAFSRRSSPVVGSLAWLSPAGSNGQAPVVSGLSASSCVAPSSWPTCVETGCSRWWDTLPWIQTLI

SEQ ID NO: 5272 - protein, 36 aa, Homo sapiens
MLTIFFLPLATSLPTCFLSTLVQLFLQRPRSSELHI

SEQ ID NO: 5273 - protein, 56 aa, Homo sapiens
MPVKARALVFLFLWSAAEMTATAPSQYIYMSFLWTSAPFKIKAGTQMWGWKWSSPF

SEQ ID NO: 5274 - protein, 32 aa, Homo sapiens
TTAAAAAAAATAFCAGGGGGRSGEHGPRGAGR

SEQ ID NO: 5275 - protein, 12 aa, Homo sapiens
VALTGLALGCSL

SEQ ID NO: 5276 - protein, 66 aa, Homo sapiens
LSRTPRPAPRRHPRRSVLFPLCFSPVLGQSCPRSRVGLRVCAGAAGAISPLGGRWSPGARGRDHGG

SEQ ID NO: 5277 - protein, 34 aa, Homo sapiens
MSHHGRPCITPLCSLPHAAQPELHSQVSGASLLI

SEQ ID NO: 5278 - protein, 18 aa, Homo sapiens
LFLFLAAAAGLVVLHLRG

SEQ ID NO: 5279 - protein, 37 aa, Homo sapiens
LSACVCCRVLSLHWCASGQAALLGPGPCLPTPPPSWA

SEQ ID NO: 5280 - protein, 13 aa, Homo sapiens
MMGIPPVLLLLFS

SEQ ID NO: 5281 - protein, 28 aa, Homo sapiens
MKPPSLFLPLTALEPRSQAGHGSGVLQG

SEQ ID NO: 5282 - protein, 29 aa, Homo sapiens
LGSLERGLLKITAAAFGLGSVLSACARTG

SEQ ID NO: 5283 - protein, 95 aa, Homo sapiens
MFPRHHRRKLRRLTALTSAVNSAHLASGATPASAVTSTTVATGWRSLVGTTNTSMSAVAKISSTSTTCSGLPPSSTLLACSWASSLPLSLEALRT

SEQ ID NO: 5284 - protein, 45 aa, Homo sapiens
MRKRKRKKRRRRSHPQNLLSWSTISPTNSKITSSRSQSSVMSVPG

SEQ ID NO: 5285 - protein, 72 aa, Homo sapiens
MAIKGLSFLLICLDKQQSPFGCLLVRIFLKVSCTFPCFDEWNGRAGFNCLMATVLGKCQNLHVSHPRATGRV

SEQ ID NO: 5286 - protein, 38 aa, Homo sapiens
TSACVRAGFVAAAARAGAFAGLVAPAHFYSSPVLLFRI

SEQ ID NO: 5287 - protein, 88 aa, Homo sapiens
LCLGSRSGRILALLAFLFQKTRNRPAGLRDLKRDCYSLFSGSGRGSLSRSVERGEGRIPCDRLWLSWARAWRRYVESLSRRHFWLPTC

SEQ ID NO: 5288 - protein, 49 aa, Homo sapiens [sequence omitted]

SEQ ID NO: 5289 - protein, 26 aa, Homo sapiens
LTTSFLSFFCFFLPAVISVSSFCHTA

SEQ ID NO: 5290 - protein, 18 aa, Homo sapiens
LCLCAGLLVLLPSCRCSS

SEQ ID NO: 5291 - protein, 81 aa, Homo sapiens
MWPLQHISVASVSVVSFLCLAPHGFKSTRAGVETAHLALILSDWWFWPVSRYLSIGKAALRCGGHPDSHRLHSRNGSMRLY

SEQ ID NO: 5292 - protein, 64 aa, Homo sapiens
MTSLSIPSQNCSKRLLSSSLCSSSSRILQSSSTSSSFSSCSSTPSSSRLAWSTSYSISSKGPSS

SEQ ID NO: 5293 - protein, 47 aa, Homo sapiens
MPRAAAPSVAAAAAGAQGAAAAVRWGRQREAAGRAAGAGAGGAARPA

SEQ ID NO: 5294 - protein, 40 aa, Homo sapiens
MPSRMSNLSATRQVFLWSLGQATCLFYCKSCHEILRCEIG

SEQ ID NO: 5295 - protein, 34 aa, Homo sapiens
MPPAARWPGPQCPKRVFMLFPTALMVPSDRLALL

SEQ ID NO: 5296 - protein, 82 aa, Homo sapiens
MSSGGRMQRMGRLRPWLCVPLRVGAGLGPNSTAAGFSLISEPRRWQSGRPGQVNPRAAGAQAPTPAQRGRKGPPPAQRAQRP

SEQ ID NO: 5297 - protein, 34 aa, Homo sapiens
MRARRAPCLQSLGTGAPAPPLGSPPKRDLRSVDP

SEQ ID NO: 5298 - protein, 28 aa, Homo sapiens
MFISLWFICPRIFTAMAGTKGKRWSPTS

SEQ ID NO: 5299 - protein, 68 aa, Homo sapiens
MIQPLQRPPAATPAACAGAAAVAAPGTKSGGARGRPPGRASCSPSPAVKYVPRQVLRRCRAGRSLLTS

SEQ ID NO: 5300 - protein, 97 aa, Homo sapiens
MQKSPSSASLTLGAVDQSCSYSAILAPYSHYLLELWLRHYNRALSPLSKSWEMVIVNASPILEAPGCRGPQLDPSHPWSLTLDLSQKAEKRSSLESL

SEQ ID NO: 5301 - protein, 17 aa, Homo sapiens
MKLVFLGGDFSIVLSMC

SEQ ID NO: 5302 - protein, 27 aa, Homo sapiens
LEGVVLLSQLSCLSAMFSGRVWLGLPP

SEQ ID NO: 5303 - protein, 23 aa, Homo sapiens
MRAWLTATSASQLQVILLPQPPE

SEQ ID NO: 5304 - protein, 56 aa, Homo sapiens
KCPHLLLSSSLTPSHPLASDPFSTGDLPLLRSSSSSFTSPPSSSLALIMLMLEENE

SEQ ID NO: 5305 - protein, 32 aa, Homo sapiens
LDLLASVLRLVSSSAGALATRPARSPQRSGRV

SEQ ID NO: 5306 - protein, 84 aa, Homo sapiens
VLHTWVSLPRAVCSGSFGPVGGCGAAGVACAVRPGILPVMEAAAAAAAGSRCAPSTAAREVGKFAARRPKARGAAPLCRELSPI

SEQ ID NO: 5307 - protein, 16 aa, Homo sapiens
MKTRKQIRLCIIGWFL

SEQ ID NO: 5308 - protein, 37 aa, Homo sapiens
MVAPRAAPPAGAFLSGQAVFHGRELLAELPLFAMDFG

SEQ ID NO: 5309 - protein, 46 aa, Homo sapiens
LLVFRRTLSNLLYMPLLRGLLWLQVLCAGPLHTEAVVLLKQKVWCK

SEQ ID NO: 5310 - protein, 45 aa, Homo sapiens
LTPGELSLPPRCRPIFRGRKMPSNAPTNFLRLAKSSLLWMFFMML

SEQ ID NO: 5311 - protein, 81 aa, Homo sapiens
RKYQSLCKQSLVYSCLHQSTVRFMKKNKLRTTLYVHLQMPQLMLVGCLSAFCDNEHMDFCLLNSVDPFSQLPGAWIFTSNC

SEQ ID NO: 5312 - protein, 19 aa, Homo sapiens
LGTVLLQALLLPSAATQER

SEQ ID NO: 5313 - protein, 39 aa, Homo sapiens
VEREQPGRKLRRLDLLVLTHLTSTIQQAAMTPQLSLPLT

SEQ ID NO: 5314 - protein, 97 aa, Homo sapiens
LSSWMRFLISIICTWRFIQERITGADLNHGAHKWGGCSSGHGKNFLLQLETAFCVAGYHADSTNTNPHLDAVQTPDVPPISVSLGNVSMTERLKDRV

SEQ ID NO: 5315 - protein, 46 aa, Homo sapiens
MSGGEGAALPILLLLLALRGTFHGARPGGGASGIWCLLLPEQEPPV

SEQ ID NO: 5316 - protein, 27 aa, Homo sapiens
MTGSTLTSTSCGFVFVATWSGPRPGLR

SEQ ID NO: 5317 - protein, 30 aa, Homo sapiens
VRTQLREGFVLSSVLWCRASSSPAQPRRLN

SEQ ID NO: 5318 - protein, 191 aa, Homo sapiens
LFFLFVCFPPFAPGSCAASSCKAVCRGRARPSPLAATPPRGRAGPEVARGAGGASPSERRERRQRSRTHSAAGRHQLGRARTRTRRPARRGPARARVGGGGRRGAAASGGHAGALLRVQPQLPGSGALPRRRAELLPRGGRGGRGRLHRHAGPHERVLAPCARRAVPGRHGPRLRALHAAAAAQGHGEAAL

SEQ ID NO: 5319 - protein, 22 aa, Homo sapiens
VLLFLKLLKFVGFSLFLSLLEQ

SEQ ID NO: 5320 - protein, 29 aa, Homo sapiens
LNERGQRMLPMLPLFIVSPGGSHVLEEGW

SEQ ID NO: 5321 - protein, 42 aa, Homo sapiens
LQGGAGTEPVPGACIGLEVGLGLGAGASLPLQLTSVVLPLGG

SEQ ID NO: 5322 - protein, 38 aa, Homo sapiens
LYFLEKSVFFLLTLTASFWPGTTGGTWQIMGFEELSIC

SEQ ID NO: 5323 - protein, 78 aa, Homo sapiens
LLLKSPGGRRRRRGFLAAASAPPPPSPSPRFLSAPRAPATRPQPALSSAPRSRRARPSPRHGGPAGPRAPLHRAAHPA

SEQ ID NO: 5324 - protein, 15 aa, Homo sapiens
LLFLVFLEMLSPSIF

SEQ ID NO: 5325 - protein, 24 aa, Homo sapiens
MLYSKMKENMKCFFLSLLVECVSI

SEQ ID NO: 5326 - protein, 61 aa, Homo sapiens
LDLLRLPSCDAVLLFVLGGSASAEMWAAGQDGHSGSAQQRSPDSDWGSKQGLDRPGEPVGQ

SEQ ID NO: 5327 - protein, 70 aa, Homo sapiens
LLKVSPPTCIALQSVASALANSASSPADWASAEMWAAGQDGHSGSAQQRSPDSDWGSKQGLDRPGEPVGQ

SEQ ID NO: 5328 - protein, 63 aa, Homo sapiens
MEQIRTTPWTLISSLAPELAFEASAEMWAAGQDGHSGSAQQRSPDSDWGSKQGLDRPGEPVGQ

SEQ ID NO: 5329 - protein, 95 aa, Homo sapiens
MTWGLQHPSSKPFPKKVKRSQDDWHLLLLLLFFLFPCPAPSCACVSDNTGASTGVENPAAQLSSAHRSLGNGLSLCNKKIFFFFLNLHYIFFDCL

SEQ ID NO: 5330 - protein, 62 aa, Homo sapiens
MRRGFHLGLSSGMTSSVHLLVFKDHLLSMLSCCQGACCPSTPHEGTRSTVSWIPPTYKAATH

SEQ ID NO: 5331 - protein, 33 aa, Homo sapiens
LTGPRLLDAASPLLLPAGRAPVAAAKWGTKALC

SEQ ID NO: 5332 - protein, 67 aa, Homo sapiens
MTKVPSCFLLPVLLLGRKRGLMRLHSGAHITRCICRHRAGCLQPGEGQREGVYECECVCMEVGALGV

SEQ ID NO: 5333 - protein, 37 aa, Homo sapiens
LARRRRGLAIASGSCELCFGAGALPRRTGGRMNPAYL

SEQ ID NO: 5334 - protein, 129 aa, Homo sapiens
LRSIPFMGQRGAVGPPAALGVEGGAAPAPLTLACPSSRYFLDSTSETSLMPKTWISWAEIRSHTSSLSMSHPSLCCRISPTFASRSLIPLRYPSKSTSKNVSTSSTAAALMGGTALCTALQASLAAPRL

SEQ ID NO: 5335 - protein, 13 aa, Homo sapiens
MYIFPILFSVYME

SEQ ID NO: 5336 - protein, 51 aa, Homo sapiens
LSLPVMATFGCCLHVWGHRAPSPSPEKLSQAFWLSSTGALQTPGPFQSKSN

SEQ ID NO: 5337 - protein, 33 aa, Homo sapiens
LVFGAGLAPSLGSGSSLSTRASPPSLLGAALRG

SEQ ID NO: 5338 - protein, 83 aa, Homo sapiens
LTGQSLPTPLACLTCLIYSPTALQAALVHGLSLHQQVPSAPDKPLLVSPSPAKHPPVPPPVGLASGLWTDSCPIPETPRDRAL

SEQ ID NO: 5339 - protein, 93 aa, Homo sapiens
LTGQSLPTPLACLTCLIYSPTALQAALVHGLSLHQQVPSAPDKPLLVSPSPAKHPPVPPPVGLASGLWTDSCPIPETPRDRALARGPWPGWVG

SEQ ID NO: 5340 - protein, 110 aa, Homo sapiens
LLVLLVLFILQQHSRQPLSTGSPCIRTNNLWSVKIQAPVRFEWAVKSRVLLPQVPSAPDKPLLVSPSPAKHPPVPPPVGLASGLWTDSCPIPETPRDRALARGPWPGWVG

SEQ ID NO: 5341 - protein, 112 aa, Homo sapiens
MPHSRNHACSPGPFAVLWASGGFPAIQAGLPPLRRLVPRVGGGLSRMPPGVRAWWAQFSLPLSLGEEEGLGGLRSWALGLSCPPLLLCEAADPSLPTEGLGLEASSRLPGES

SEQ ID NO: 5342 - protein, 102 aa, Homo sapiens
LLWGFATGCWLFSPPLSRSLLLLLGCSTPVRIRRGGTSLSAAANSRRVRLRTPGAESRVPPPPRGTHSPRSPGPRVLPPATLPHFSPLFQSHGILRMPERWR

SEQ ID NO: 5343 - protein, 113 aa, Homo sapiens
LSSRLGTPGSLTAAAAASASRTIGSLGNNSGGRPQRGSGSPCLRGSGDSSRPPPPGRTASVVPACNASAGEWLLLCPSWGPSQDQSANSIPPAGRSRGAGTKPAASSRADPGT

SEQ ID NO: 5344 - protein, 38 aa, Homo sapiens
VILAYVCSSLLRVLLSSGAARNGGSHLASAAGMDQTAS

SEQ ID NO: 5345 - protein, 31 aa, Homo sapiens
LNMGLVLLSSGAARNGGSHLASAAGMDQTAS

SEQ ID NO: 5346 - protein, 194 aa, Homo sapiens
MARSVWCWSTSASAGPTASQWTTRMGSCTGAMHGQTRLNGSTWRQVRTARWFCPATTWTCFQCLCLRISSTGVTGLMPTALSSAGAKTMPQTPCPCEPASASSLKTSKSSTGTGRKAPTCARWPMAGASSCACTGAVGSGPAPVPTGCWLKTEHRAASMPATCSTQSAPFSRVSTCRMSATSMRPCSPSRTLST

SEQ ID NO: 5347 - protein, 54 aa, Homo sapiens
MRAVNTTNSKCRCRMRPRCRRLPLGLSGARPRSACMCRTPTSPPCSRRTHFGPA

SEQ ID NO: 5348 - protein, 54 aa, Homo sapiens
LSGIAAYALILQLVSNRGSIDWELLIQKIKRKKPENIINPLRTRHNELYILPLP

SEQ ID NO: 5349 - protein, 107 aa, Homo sapiens
LISPTLLVLVATRVRGRPRPPSVCRCSGGGLAGCGRVCACGLGPGPSQKLKRQMSGIATLAPPVAGGLWGSTWSRTEKLLCLCSLGTHWKLYSDIFWDLVWIVQTGA

SEQ ID NO: 5350 - protein, 103 aa, Homo sapiens
MQQKPHRLERNKSSFLCPGAGCGALAEPSLQSPPGPLAVEGGLGLARRAARPEHPGQKTIDVHLQMQHPVPGALRWVQNVDGVFKRISFQVDQEVNVVILFPI

SEQ ID NO: 5351 - protein, 52 aa, Homo sapiens
MAHIPAFLSRLYLPLHPSRPSQKIYKISSGKSLGVLGRERRKIVGWNKNRVE

SEQ ID NO: 5352 - protein, 29 aa, Homo sapiens
VCVLCYLSLYALQNLFTLLFWKRIPEAKP

SEQ ID NO: 5353 - protein, 116 aa, Homo sapiens
MHCPCLLSACCMLGPSMRSAVMGTRKGLCRRHGETQRAAGAEGRAAQAAVLHHTQAREARDRVRLHAPLPGDRAAARAGGTGEGHGEAAQDSEQLHGTAEDQPGAGGQAVPHGPAL

SEQ ID NO: 5354 - protein, 45 aa, Homo sapiens
LSCCRLLSSLQPPSLAYSAQESLEPPPPLPNQVNLTRSRGRCRKA

SEQ ID NO: 5355 - protein, 33 aa, Homo sapiens
LVRLSSCVPVALMSAMTTSSSQKNITPAILTCC

SEQ ID NO: 5356 - protein, 88 aa, Homo sapiens
LSCSAMVDVLAFPLPSAMIVSFLRFSSHASCTACRTALSFIKYPVSDRVDFNWQSYSVLFTWKILCNLKVLALLTLRMTMEHLNGSCL

SEQ ID NO: 5357 - protein, 267 aa, Homo sapiens
LPLWAALPLHPQRGRAAARAVGGRLRGPACLWHARCVAPGLPAGAAAQVAPQPQLLGLPVGPPSAPGRPRVAAAARQPHVAHAAAALLLFGLVLLLLRLLLFLGLRGLHALGRPDMLRLRGGRGCGRSAVRHRGRRGPAGAGGPVRGLLVGLVRQQRLRLRSGAQQPHHAARHPDPQLCRRGRRRLLPQSAAAAAAGPGAPRAAAGAAQRDPPRRGRRTSLAALQLPAAAPPVRLARVRRAPQPPGLAVGPRQLPKRLPELRQPQRL

SEQ ID NO: 5358 - protein, 38 aa, Homo sapiens
LENPNFSLFRLLFLAKFKGWLLVHPVALCHAETVCRQA

SEQ ID NO: 5359 - protein, 102 aa, Homo sapiens
LLRPPRSCLSSGPGLGFVLGLGSFCAPRCPVCISAPPAGPPRSPPARFPRCPPSLPPTLSRGSRPSTPFGRGPLAPPGRAPPPPGPAAPDARAPRGCWRPGP

SEQ ID NO: 5360 - protein, 32 aa, Homo sapiens
LPRSCAAPASLRLAGAAETSMAWWQWLAPGWP

SEQ ID NO: 5361 - protein, 33 aa, Homo sapiens
VFCLPSLAVWGLPGPLLAASIDPRCAAICHGRH

SEQ ID NO: 5362 - protein, 32 aa, Homo sapiens
MVWNFLSLILMMHHARKFFLIPKLQFQNYLPF

SEQ ID NO: 5363 - protein, 119 aa, Homo sapiens
LGGLGAAHLLLSGECVCRAAGGLRLPPHLHGFLQPGLPVHCPYPRRLGLPRWRPGGTQANHGGLCGPASAPGARQCDAHAAAGAAAPAAARHAAPEPGAGFLWLRAALQLGISSLLPAP

SEQ ID NO: 5364 - protein, 96 aa, Homo sapiens
LAFCRRCGAWVHWAWCLVAALSSFPSTAQGPSAFCGAGLRPCCVPLPWISRELVFLEVPDPCSGPGRLPGPSYGHERLWRVICSSRNRRILHGSVM

SEQ ID NO: 5365 - protein, 45 aa, Homo sapiens
VCSERQRRLLGGARAPLCPSFLLQSLGLPWSHPPPACPLVSLQGP

SEQ ID NO: 5366 - protein, 60 aa, Homo sapiens
LASAVPLRLLGLPADAAFLAPLGVPLPGRPPPASCSSCLGMGPPPGLGRPGWGPRGASAP

SEQ ID NO: 5367 - protein, 40 aa, Homo sapiens
VCVFRSDVPTVPATGRLWCTAAAGSTSAASTVWYSVFSKL

SEQ ID NO: 5368 - protein, 15 aa, Homo sapiens
VNVILKFVMWMLMQP

SEQ ID NO: 5369 - protein, 35 aa, Homo sapiens
MIRKAGSGCRAAGGPGGLIFNLSMPAAPFFPDQGL

SEQ ID NO: 5370 - protein, 139 aa, Homo sapiens
LGRHRGRLEALLPGGDTQSRRHRGAGCVRWLAGAALPCSLAPGCGAAAGASPCPGAGRRRAAGRRCLACECTSLTCKSGSAGASRGSASRPAQARAAGSGTRQGRPGAAALPRGASGHPPILSLFSSPLACPRAKPRSA

SEQ ID NO: 5371 - protein, 10 aa, Homo sapiens
MCLLIVLLFA

SEQ ID NO: 5372 - protein, 60 aa, Homo sapiens
VDLKRLRVSFKTLLYVAAMHFFQLYFQPCNVHTSISVPRPLQGFLVPERAMCFSPLELFE

SEQ ID NO: 5373 - protein, 46 aa, Homo sapiens
LCVCVCVCVCVCVCVCVPMSMYRVRGGRVAGGCFIGWRAPCPRAIK

SEQ ID NO: 5374 - protein, 64 aa, Homo sapiens
VMCVLAFLTTPLLCISFFHFLFQAFLFLPCGNSFGASDCSSSECAAIPVDPVPGLQLLHLCQLS

SEQ ID NO: 5375 - protein, 50 aa, Homo sapiens
LGGVHSTFLPSHRKLSSAVGCWGRLMFGSLSTLPIPDSPSHSFQSPQGDT

SEQ ID NO: 5376 - protein, 114 aa, Homo sapiens [sequence omitted]

SEQ ID NO: 5377 - protein, 44 aa, Homo sapiens
LPSLSLLSLSPMQPSEVMGVNSPRGYRFTLAHSSPGSWGSLLPQ

SEQ ID NO: 5378 - protein, 45 aa, Homo sapiens
MAQAIICGALSVVCPAGRAGVTSARNPDGVWRGGAAGEPGPDRPR

SEQ ID NO: 5379 - protein, 130 aa, Homo sapiens
MGHRPAGGMGGLGLLGRAPILRGAAGEGPGNPDHAQLARVRLPPGHQLFLAHHRAPGPGTDPPPRAALGDPGGALQLAASRDLLKICCVPSTALALVGTQNSPNPCMHANKNVKITTETSLRRARYRVLV

SEQ ID NO: 5380 - protein, 22 aa, Homo sapiens
MKKSCRWVFFLITKSLFKETVA

SEQ ID NO: 5381 - protein, 42 aa, Homo sapiens
VAFFLWLPVGLRTLADICWLATANIIQDVQQREQHRWQNRLS

SEQ ID NO: 5382 - protein, 43 aa, Homo sapiens
LSLPYLSLVQVLSALCGQRILLQEEVRVHCGAKADIKVCVLCG

SEQ ID NO: 5383 - protein, 126 aa, Homo sapiens
LWGFLLWVSFICAGRSLIDLVPSSSAFSSRLSSASAPSSWWLFHFTVILSTPSSALPLPSQACPFTSSSSECQNISDRFTSEGSWGLPQGTSRSCVCQLLQKWIWKMEERCPSNGIPNLTKHHLES

SEQ ID NO: 5384 - protein, 104 aa, Homo sapiens
MLSILFLPVSSIISISYGQSIVGNWCWLTLHGRIEKSSCESLPKAAPQWSLWLEVHGPPCSCPWRTPRVPSILLRPTLFKNIYSMYAYMELKCHYCNLESALKY

SEQ ID NO: 5385 - protein, 68 aa, Homo sapiens
LPSGAFSTCCCLTGFLSEPHALRPLIPGRKGWSPQHPQHPGKWGARLCQRPSRSTRRCSSPITPSCRP

SEQ ID NO: 5386 - protein, 67 aa, Homo sapiens
VPRAFSTCCCLTGFLSEPHALRPLIPGRKGWSPQHPQHPGKWGARLCQRPSRSTRRCSSPITPSCRP

SEQ ID NO: 5387 - protein, 51 aa, Homo sapiens
LFSSGKIALASSAFISGAEGLTGLEIAPEKSIRGVRRLVPHCRARRSRWWL

SEQ ID NO: 5388 - protein, 59 aa, Homo sapiens
LALPPRACSPPSPRLHPPRSRKRQLRLRGWRRLPPPTTSALAALALRPSPAAAPPPRRR

SEQ ID NO: 5389 - protein, 30 aa, Homo sapiens
VPGWVLVCALLLPIPLPPRIKEEPGGVLRK

SEQ ID NO: 5390 - protein, 67 aa, Homo sapiens
LRRFSPRKCLLRFPCSSVSHTLSISFCNFQAFPSNCMYLVTCFQAGSLSGPLAWGKPPHLLRVLFRV

SEQ ID NO: 5391 - protein, 33 aa, Homo sapiens
MTFSKDLSFCRLASELCLLGATSLRQLRMWMQI

SEQ ID NO: 5392 - protein, 35 aa, Homo sapiens
LRAILLSLSRLWTCAKGPLLSPDDAHTNGFSDGGD

SEQ ID NO: 5393 - protein, 68 aa, Homo sapiens
MPAARAADLAAPAGAALCAAAGTLAPVEPGSRCNSSWMVAQPVRAGQGLCSTWRGPPIPGCRTLCPLT

SEQ ID NO: 5394 - protein, 64 aa, Homo sapiens
VLLPRLLTLALWLGSACRPLACSLRGKSCFLSAPFTHARARWAVPSSPALLLLLVLANAAVGED

SEQ ID NO: 5395 - protein, 55 aa, Homo sapiens
LQKASFLLCSLHPPISHAALGQTSTGLSWVWGQHGAGGGRAALLAWRKVEWLEPR

SEQ ID NO: 5396 - protein, 29 aa, Homo sapiens
MVPQLGAGHASRSVAPALALFPAAAPGRA

SEQ ID NO: 5397 - protein, 31 aa, Homo sapiens
KARAGAGTLGLAVFSSCSAVGGGGRNQSLGD

SEQ ID NO: 5398 - protein, 10 aa, Homo sapiens
ILAVLIFWIN

SEQ ID NO: 5399 - protein, 61 aa, Homo sapiens
MNSQMPLRVSFFCGLCRMAMVMSAMYECGQILQDLTSKKTGGGAGGGGEDVWPMHAECKAA

SEQ ID NO: 5400 - protein, 33 aa, Homo sapiens
IRRRGKWTQDLTGLSLLLAGHGGFGGRCKVYCG

SEQ ID NO: 5401 - protein, 36 aa, Homo sapiens
RCASRVMPGEWKDLTGLSLLLAGHGGFGGRCKVYCG

SEQ ID NO: 5402 - protein, 37 aa, Homo sapiens
MPSWGPVGPTYKSSPWEPGCLALLPGSVSATWSATDP

SEQ ID NO: 5403 - protein, 12 aa, Homo sapiens
INLLILRIILKL

SEQ ID NO: 5404 - protein, 55 aa, Homo sapiens
LISRTSTLLPALRVLLGQGLPCHATCQCLAVEPLGAAAVPAVQFVLGVSVPFHGP

SEQ ID NO: 5405 - protein, 17 aa, Homo sapiens
RLLHFLIFLMTKMNGNL

SEQ ID NO: 5406 - protein, 54 aa, Homo sapiens
LAASVLTLVTLGRSLTLRALWHPRLKGAVILQPCWSVRVRVRGICAPSTVHGTW

SEQ ID NO: 5407 - protein, 47 aa, Homo sapiens
LPPLRCIRGARTDLMAWATGVVPGTSRALAAPSLQGPSAPGRTWATG

SEQ ID NO: 5408 - protein, 64 aa, Homo sapiens
VESGDDVQKWHLERGRKRRKNRSSASDLRWLKERMYLVSAISLHPSMTLLSMSLIFLARKPSAV

SEQ ID NO: 5409 - protein, 65 aa, Homo sapiens
TFPSALFSPGRAAAAAAAAAAAGGGARWRRWPGSPWRTVKEAAKKKSATTTTVILEIIIMDRVIP

SEQ ID NO: 5410 - protein, 23 aa, Homo sapiens
ITAGLLMLYARRKRARDNLVLDN

SEQ ID NO: 5411 - protein, 40 aa, Homo sapiens
MGLWARRACSSATQLTLSPKSTSPPCSTITARRAQLTGAQ

SEQ ID NO: 5412 - protein, 55 aa, Homo sapiens
MKDELARGRIASRSCAALAAAGTPCSALSLGPETSHSPHTPPPQLRFSGGRGEGR

SEQ ID NO: 5413 - protein, 15 aa, Homo sapiens
RGWLVVLGVMCVIGL

SEQ ID NO: 5414 - protein, 34 aa, Homo sapiens
ISCVASSLVLVPPGSGSQDRLSSDPSAATVAAAV

SEQ ID NO: 5415 - protein, 21 aa, Homo sapiens
LRLRLRRLRFPMGLACGAWAL

SEQ ID NO: 5416 - protein, 72 aa, Homo sapiens
LKPSGRRRGLTLALGSSGHCSGPRLLLLTSALRLFSIGVEAPPVLSCLWREANLPLDQREEKAETGSNAVDW

SEQ ID NO: 5417 - protein, 24 aa, Homo sapiens
RLTAIFLFQLILPRCISQKTLIHR

SEQ ID NO: 5418 - protein, 71 aa, Homo sapiens
LVSEGPFCFQGGACEKWHLERGRKRRKNRSSASDLRWLKERMYLVSAISLHPSMTLLSMSLIFLARKPSAV

SEQ ID NO: 5419 - protein, 43 aa, Homo sapiens
LPRRGKHHRTSANTGLKIVIHLPPPLPFFFLELLRSPVGIPAD

SEQ ID NO: 5420 - protein, 41 aa, Homo sapiens
MNDSAFPLRGMWVLRMVGVKLPLLSADSTSSLNAEICKKGK

SEQ ID NO: 5421 - protein, 45 aa, Homo sapiens
MEEITRFWMSCAHSVFATGLQSVLTSISSVTISYQEETCYCRHVL

SEQ ID NO: 5422 - protein, 38 aa, Homo sapiens [sequence omitted]

SEQ ID NO: 5423 - protein, 89 aa, Homo sapiens
MQDSTACGSCSGGLLLTRPSTLPLARSAAPCLGLSALPPLPVTAGHDIGQDAAEGTRHAKKMAHPPRHRRPVRPPGSRRASTGLPGGDS

SEQ ID NO: 5424 - protein, 38 aa, Homo sapiens
MMGSQLLMTSDLKIVLSLFLLRAVKGWIISGVATPGLA

SEQ ID NO: 5425 - protein, 48 aa, Homo sapiens
LFQMKILLAAQIIRIGTSCIWKLLQWAFGVTKHTSGVPCGENPVQPAP

SEQ ID NO: 5426 - protein, 31 aa, Homo sapiens
LYFFYFVTFCDFFVQNCICTIEQFPADGMNE

SEQ ID NO: 5427 - protein, 73 aa, Homo sapiens
LLSSRAGFVALVTPRGRRKEPGRFDLCGLDRAGQRGTDPLRSRASSFWGMLIRGCAPCSSFMQALGKAGAAAA

SEQ ID NO: 5428 - protein, 82 aa, Homo sapiens
LRATLWGPAPWFLLLPLPPPDPSGPACSAPTGLQPASHRTFGGPRLERSAGVGAPRPQMQSSYREEARGIGSHILFADKKGS

SEQ ID NO: 5429 - protein, 16 aa, Homo sapiens
MLNCFAFLKIFLVTFS

SEQ ID NO: 5430 - protein, 46 aa, Homo sapiens
LLLLFLLIFFSWCVWWLFLSVEGKRRYHPRLSPTPLQNGFSDTPAV

SEQ ID NO: 5431 - protein, 58 aa, Homo sapiens
LLLLFLLIFFSWCVWWLFLSVEGKRRYHPRLSPTPLQNGFSDTPGSEGVGSPGCARSK

SEQ ID NO: 5432 - protein, 35 aa, Homo sapiens
VLSCYGIPLLSFLLSNQVECFTGTWFIQLKITWDL

SEQ ID NO: 5433 - protein, 23 aa, Homo sapiens
LNGEGSFVFSWLALTFSCVGTTG

SEQ ID NO: 5434 - protein, 51 aa, Homo sapiens
MRPASLRTSLKATASCRQPRTQMRASLGVCGTASSMVTMATTSGSMSAMGS

SEQ ID NO: 5435 - protein, 80 aa, Homo sapiens
MSLGMWQHQWDKMDTGPPSQAPDTGHGGETSPPWPPWLPRFARGCSSVRLPLCTTVALGPGLPAHWPSPPSPAASYQQFL

SEQ ID NO: 5436 - protein, 39 aa, Homo sapiens
LTRSYLKLLLLLGLESTYLFHLSQLEFWNFPPRGGGGGC

SEQ ID NO: 5437 - protein, 26 aa, Homo sapiens
LFSFLLLLVLKYIHTQIQIDRSKSMK

SEQ ID NO: 5438 - protein, 10 aa, Homo sapiens
LFLLGLGSLL

SEQ ID NO: 5439 - protein, 32 aa, Homo sapiens
VIRAFMVPTLWMVSGGDLLSLINELHSCCFPS

SEQ ID NO: 5440 - protein, 34 aa, Homo sapiens
MKIHLPLSWLLMGVGVLLRFPGWKIISPGPSYIS

SEQ ID NO: 5441 - protein, 79 aa, Homo sapiens
MALGLPLRACGLWNMSSRLCSAELLFCKETQSSLNLATEIRDSGALSFLGMDYGPVPHLSGALQMSWRSIGQRTKIHSR

SEQ ID NO: 5442 - protein, 126 aa, Homo sapiens
LPDYSPTLHWCLITTGMPALVIHPHSLGDKSIAGTPALAAHPHCSPGLLNAPRCPTRLLRASTLSFLGFTSFTMGNLPPSIPPSSPLACVLKNLKPLQLTPDLKPKCLIFFCNTAWPQYKLDNDSK

SEQ ID NO: 5443 - protein, 152 aa, Homo sapiens
LHPNLGRLKSHRPHPKLRAALLAHPPPAGLAAMTAPARRSRSLRPGMWSPKEWWEPQPGRDAAAARARSPYPGHLWKPAHLLHQPFPNTVVPPLPSLLKNRIVWGSGIFWTPGTPIRLPLVPLLQSNEPMGCQALETFPPILTMSPFCQRRN

SEQ ID NO: 5444 - protein, 35 aa, Homo sapiens
IPFNLLTLLLFEGTYIRAYFAKKEDGCFRSGHRKS

SEQ ID NO: 5445 - protein, 17 aa, Homo sapiens
KPRRRKRRLVGTMGIML

SEQ ID NO: 5446 - protein, 59 aa, Homo sapiens
RNSWPLLPWLLLPATSSLNMSEIRKQPNLSCNRDGHARKQTARACSLVGAELSSRVVAN

SEQ ID NO: 5447 - protein, 38 aa, Homo sapiens
MHLSGWERWGQRLSCVPAALSAQESPAQSTASQHGEQP

SEQ ID NO: 5448 - protein, 45 aa, Homo sapiens
MCLSFTPPLSAATAAAAAAAAAAARIAAAPSLARRRYLLGQKFYE

SEQ ID NO: 5449 - protein, 12 aa, Homo sapiens
ITMYFMWRTLFF

SEQ ID NO: 5450 - protein, 18 aa, Homo sapiens
LLLLLLLLVAPLQMYCCP

SEQ ID NO: 5451 - protein, 19 aa, Homo sapiens
MTMVAIIITAMGMMALMTE

SEQ ID NO: 5452 - protein, 73 aa, Homo sapiens
LSPSTATLMNGRYGRAALTQFCTLTCGGGQTSCWWLLLMPTLWGRWPVASVTTCLPASCGPGTAASPCSSARP

SEQ ID NO: 5453 - protein, 11 aa, Homo sapiens
LLLFSSLLLCR

SEQ ID NO: 5454 - protein, 8 aa, Homo sapiens
ISILAVAL

SEQ ID NO: 5455 - protein, 40 aa, Homo sapiens
LATSLKWNLLVALLPLQLWCYTEKLEVSKQTREKEKHQKV

SEQ ID NO: 5456 - protein, 52 aa, Homo sapiens
VFYSKVLNMGVSFFYSLSLMTQQKRNCRPWDNQHLNKLYNYFFKLSYRVIRL

SEQ ID NO: 5457 - protein, 50 aa, Homo sapiens
LVGSSSWPRQTGGGSGPDCGAMAVVSSFAAAASLAESPASALGAPTASAG

SEQ ID NO: 5458 - protein, 105 aa, Homo sapiens
LLPLLTSVLFGRAPSTHLWIHLGALGTMGWWNGCSEILEEWCPHFADTPATLTALPIVLPTYLLPQSLAGEGRWPGAISLQRRGSCFDYHLHLTGQALTLPFIQV

SEQ ID NO: 5459 - protein, 41 aa, Homo sapiens
LPPASMSPPAAAAAASASRARAPASRSRSRCLGHWPPDPRL

SEQ ID NO: 5460 - protein, 28 aa, Homo sapiens
IGMPLPVLLCLTLPMPLPSATARGGNRT

SEQ ID NO: 5461 - protein, 73 aa, Homo sapiens
TGRSAGAAARRRRAVRWELLVLLLLLLPTLRRPGPRCRPGPGCRLRPRRPRPRVRPSQDAAPGRVSTSWPHLP

SEQ ID NO: 5462 - protein, 66 aa, Homo sapiens
KAGGRGPFPCLFLCPASAASRLSGSGLSVPFAVTSSAPSAWKVLHHGDRQVPSRLASGRNFGAGSP

SEQ ID NO: 5463 - protein, 25 aa, Homo sapiens
LGLSFLLLCFKMANKSWSSESPVQT

SEQ ID NO: 5464 - protein, 18 aa, Homo sapiens
MFPSWPFLWLTLCSLCIC

SEQ ID NO: 5465 - protein, 79 aa, Homo sapiens
MPTLSRPCGITPSSLTLSWRASACTAATWSASAAAPSRSKVTCAAWSWGTTASQRTTKRRQPPSTPCRACGGWTCQETP

SEQ ID NO: 5466 - protein, 31 aa, Homo sapiens
VGIFFFFFVWRNGDTKTHLAAEVRRSFTKDV

SEQ ID NO: 5467 - protein, 55 aa, Homo sapiens
RNPARKDIGGGLALKLLFKTRKRRRKRKKRKMLGNIYLTCSTARTLASCCYSCKY

SEQ ID NO: 5468 - protein, 18 aa, Homo sapiens
IVLFFLLAVHFGGYYKEI

SEQ ID NO: 5469 - protein, 30 aa, Homo sapiens
IKQFRPLALIVLAGVVCSRLKRWSEGERRK

SEQ ID NO: 5470 - protein, 52 aa, Homo sapiens
TKAPIRRLPHCKTTWLSLCTAMSPLTTEIWALRRGNSSASWSRAASGGRRSP

SEQ ID NO: 5471 - protein, 16 aa, Homo sapiens
IFQFILCLFSGQSVTL

SEQ ID NO: 5472 - protein, 12 aa, Homo sapiens
RKFSLLYMCLCA

SEQ ID NO: 5473 - protein, 28 aa, Homo sapiens
ISLFSLTPTFLFALLSLSHILETVFNTH

SEQ ID NO: 5474 - protein, 16 aa, Homo sapiens
ILIVTLLFSPCVTLEP

SEQ ID NO: 5475 - protein, 30 aa, Homo sapiens
IMLLCLLQLAAPLCSYSITIRFYLFWLNTP

SEQ ID NO: 5476 - protein, 23 aa, Homo sapiens
LCSLILSCLFVVLKGRSFVLWVC

SEQ ID NO: 5477 - protein, 29 aa, Homo sapiens
VKSVPQLLISVFFVSNSFITKKEKKYCSE

SEQ ID NO: 5478 - protein, 32 aa, Homo sapiens
IRRSKTDISSVGGSFFFFFFSHPSGSGRFVIF

SEQ ID NO: 5479 - protein, 130 aa, Homo sapiens
LRMSEHRNEALGNYLEMRLKSSFLRGLGSWKSNPLRLGGWTILLTLTMGQGEPGGPQGDPWVPHELLLPSLCDSSHASSWGSGSITCAWRGGDSSSHPLVSGHILSNSPVAAVMCSSMGTHLSPFKGTLL

SEQ ID NO: 5480 - protein, 72 aa, Homo sapiens
IQTTNPDFLLLLFMSVPVVSAPPFCPPAEGSRDGRPKASVARPAAVHEHHSPRDCGHLPDVLRSSLGGWQPH

SEQ ID NO: 5481 - protein, 58 aa, Homo sapiens
LYSSLLLPSSHFLVCSAAVWAWAMRQGRFPIRAPTCPQSLERDSNPASMSRSLQPPSS

SEQ ID NO: 5482 - protein, 32 aa, Homo sapiens
TMTACKRWAMSVTVGCSGITSCLHLPSIPVSW

SEQ ID NO: 5483 - protein, 98 aa, Homo sapiens
LAPLQRSPEVPAYTRPACKPPVGPHSSSASVPLWLSSGTPAEAHLPLLNSRLESWQDPVAGLGMELSALCVGGLGLCLHPAQGCPSLGSPAWLLLGPE

SEQ ID NO: 5484 - protein, 81 aa, Homo sapiens [sequence omitted]

SEQ ID NO: 5485 - protein, 29 aa, Homo sapiens
MAVVSSFAAAASLAESPASALGAPTASAG

SEQ ID NO: 5486 - protein, 41 aa, Homo sapiens
MEYKKTTKAMKKRRMFYLHPISKPLLSCYCMSLQAQYRASS

SEQ ID NO: 5487 - protein, 41 aa, Homo sapiens
IRFTIYCSGCFLIPVLLGPGSFAPCPAPRRGGWCGNGWARW

SEQ ID NO: 5488 - protein, 19 aa, Homo sapiens
KRLKEYRVFFLLSFIYVEI

SEQ ID NO: 5489 - protein, 10 aa, Homo sapiens
IFFLFLLFGS

SEQ ID NO: 5490 - protein, 24 aa, Homo sapiens
KIPNLLFCFISPLGVVRRSSPCYP

SEQ ID NO: 5491 - protein, 28 aa, Homo sapiens
IDTPSSLAVVSAFLLTAWLPPPLLLGSW

SEQ ID NO: 5492 - protein, 36 aa, Homo sapiens
LSPEPPCCRRLLPLLAVSPSVPALCAPPSGPWMAGI

SEQ ID NO: 5493 - protein, 13 aa, Homo sapiens
LFFFIYYRLFAVV

SEQ ID NO: 5494 - protein, 28 aa, Homo sapiens
LFFYSEIFLIFSYTAATWMPSLEQQQPG

SEQ ID NO: 5495 - protein, 44 aa, Homo sapiens
LMMWKGLCLSATENFILAVFVETAFGKRKEMNFTDLTFLHLPFF

SEQ ID NO: 5496 - protein, 30 aa, Homo sapiens
MLGAFVWPSLLLLAGKEEHQTTDPGRHFSP

SEQ ID NO: 5497 - protein, 34 aa, Homo sapiens
MLIPEILAFVWPSLLLLAGKEEHQTTDPGRHFSP

SEQ ID NO: 5498 - protein, 19 aa, Homo sapiens
MRSRNIFRVLFYLLAFFRE

SEQ ID NO: 5499 - protein, 45 aa, Homo sapiens
LSMAGRVAALAAGGSALSKAPGEAPPLLRAACGAGHGAATEAGSL

SEQ ID NO: 5500 - protein, 100 aa, Homo sapiens
LNVQKCNRNSALISKGLISGGALTVLSCLHCLPSNILGMGSNTGIGGGRTADPNNFRLLKGGGENGREEWKGKRKNICVHLHISCAEQKSPTISKRSLFL

SEQ ID NO: 5501 - protein, 46 aa, Homo sapiens
MASSVTTISLLLLASFTSLSCVWYFMFSCQDCVDLQILSLPDEVTC

SEQ ID NO: 5502 - protein, 14 aa, Homo sapiens
LLALFILVTVPEFS

SEQ ID NO: 5503 - protein, 103 aa, Homo sapiens
VAAVGSRAQTGAILPEAASRSWGRPGGRLKLFFCLFCSLGLGEDLEVWAPSSPLETAMVSSNHHHLTTLHGGCPLRAASAAALSSPLYLSAPEPQSSFRPRDR

SEQ ID NO: 5504 - protein, 40 aa, Homo sapiens [sequence omitted]

SEQ ID NO: 5505 - protein, 31 aa, Homo sapiens
MQFGLMALMYSHCAFLFLSSFSSTPPSTPPH

SEQ ID NO: 5506 - protein, 37 aa, Homo sapiens
MPVVCVLFSLFLTCVHDSFDSASKSKSCVVTGAFIYL

SEQ ID NO: 5507 - protein, 33 aa, Homo sapiens
MESLFLFSILFVRVSRPLFTNSLQLERSFPKIW

SEQ ID NO: 5508 - protein, 24 aa, Homo sapiens
MLSLGIFILLCLSSLIFASSCSWQ

SEQ ID NO: 5509 - protein, 40 aa, Homo sapiens
LRLRFMAALPPLLGSVGSWGARSGPEPELASRAETCAPRL

SEQ ID NO: 5510 - protein, 77 aa, Homo sapiens
LTLLLPRVLSHLAAAAPVQTLTLPPKAQPSPNNPQPCTDVGCESLCLSKNQALLETFKQRLDNYFSRTERKLMHQKR

SEQ ID NO: 5511 - protein, 59 aa, Homo sapiens
LARTKRAISLLPLGQACFTAGPASGASTDRGSEASQAPTRSPNAHALRSAPGGGRRSRR

SEQ ID NO: 5512 - protein, 41 aa, Homo sapiens
MKTFMMIQFHLIVGVQWCDLSSLQPLPPGLKQSSHLSLQSS

SEQ ID NO: 5513 - protein, 34 aa, Homo sapiens
LGFSSLHSTAALVIATCLLITEESQVLRRGRNTH

SEQ ID NO: 5514 - protein, 107 aa, Homo sapiens
LVFAAVKTLSTVTYFLSQAASHLVPCADSSTVARIQYESRGDRRMVGAAGFSTYPSHQGPDALPPAPSAHPCAQLEGCMARSPLFRWVETLMIPAPPCRAPATEQAL

SEQ ID NO: 5515 - protein, 51 aa, Homo sapiens
MLFFTTNFVLSECLSYASCNAYFLISNVSIKPFFRYKENYFKLSNSEKLKI

SEQ ID NO: 5516 - protein, 35 aa, Homo sapiens
MKPLGIPLCFAWLIPCQFQIFTSGQLQGGYPCPSS

SEQ ID NO: 5517 - protein, 31 aa, Homo sapiens
LAKRLRAVLAFAATWLGQLTQVSCLPSSACL

SEQ ID NO: 5518 - protein, 11 aa, Homo sapiens
VASVLFAIFVV

SEQ ID NO: 5519 - protein, 37 aa, Homo sapiens
LKIPKKKKKKKKKKVVTIAFSVSYLFWFAETSPKQEI

SEQ ID NO: 5520 - protein, 35 aa, Homo sapiens
MKPDSANVTTWCYFFFFLLTATNPRNISCVPHCPI

SEQ ID NO: 5521 - protein, 237 aa, Homo sapiens [sequence omitted]

SEQ ID NO: 5522 - protein, 37 aa, Homo sapiens
MVMCLCILSPLCIASKSLRVCTKSYMKAMGKPGCQWF

SEQ ID NO: 5523 - protein, 42 aa, Homo sapiens
RRRRSAVGSVSARGCGGAGGSSLSGFSLGGGGGGSVDASSAS

SEQ ID NO: 5524 - protein, 32 aa, Homo sapiens
LKGRMFISLWFICPRIFTAMAGTKGKRWSPTS

SEQ ID NO: 5525 - protein, 64 aa, Homo sapiens
MFLLANSGDSPARFAKRPTVLCVALGLHFPTAPARPGGCSMRCCACVAGGLAVRLTASGLRLGG

SEQ ID NO: 5526 - protein, 24 aa, Homo sapiens
MDLKWAIIIYLIFLMDYSPGYFPP

SEQ ID NO: 5527 - protein, 18 aa, Homo sapiens
MVILLGWAVDLIRFAFSC

SEQ ID NO: 5528 - protein, 62 aa, Homo sapiens
MEQDAHYCLVLLPLSRLAVGLMPVRRSRLAAKLSWSQAVTLDLGSHWPSICIQKASLCLLAA

SEQ ID NO: 5529 - protein, 33 aa, Homo sapiens
MLCSGNTVDFALLLSWSSVLELVLSLSLCTFPV

SEQ ID NO: 5530 - protein, 85 aa, Homo sapiens
RMIRSFWFYGKTLALLPSLERNSSVVSVALRLWSLGTGWSAVRSVAMLITRTAMFPGLQPLERERAHPGYAASVSLRSPPRGEVP

SEQ ID NO: 5531 - protein, 34 aa, Homo sapiens
RFLFLLPFCLCSPNVPVSPLPHLGPLFGPCGQSC

SEQ ID NO: 5532 - protein, 79 aa, Homo sapiens
RMKRTPCGRMWSVTGTCSAAISTLPSSRPTCVSVRSLMSRMKMKCLMPLCCHPRSTEQAGCWTFYIPRGKGAMWSSWRA

SEQ ID NO: 5533 - protein, 29 aa, Homo sapiens
IYIYIYIPICIFFTDSDVCSEIVNHESST

SEQ ID NO: 5534 - protein, 48 aa, Homo sapiens
KGRGFFFFFKAILEVFSCGRSAPLLLLSPLSPTPSGLILFKIFSPILR

SEQ ID NO: 5535 - protein, 32 aa, Homo sapiens
LQTARGPTCLPWLSMSLATPWAWATPQPPTPL

SEQ ID NO: 5536 - protein, 52 aa, Homo sapiens
IRTKKSRMHIRSPAHPPDPHTPMMSWTMASSHTAPLLVSLASPPADSESRIG

SEQ ID NO: 5537 - protein, 69 aa, Homo sapiens
MQRLPAAFFRSFAAQGLGESVHINTPTSLSLRGRPFISSSGPGARARVTCAPCLHAARILCCFWRGLHR

SEQ ID NO: 5538 - protein, 72 aa, Homo sapiens
MNRLAAVRWGHSLLLSGCLTVPCPCLTGPSISAGELSSADKPAWHGALPLLLVPDPFCPEENFLSPGDAWPR

SEQ ID NO: 5539 - protein, 161 aa, Homo sapiens
MPVGSLPHPGCLWAAFLTLDACGQPSSPWMPVGCLPHPGCLWAAFLTLDACGQPSSPWMPVTWFPWGLPKLRDPKPPSNLMTRLVSEHTCVVPEPLTNPLCNPAHAFPILKGPAHRPAHVFPLPLLCPYLVGSCPFWALVWHFTHKCVLWVVSGPPPAVRG

SEQ ID NO: 5540 - protein, 47 aa, Homo sapiens
LFPRVTPRLVVSSSALFLLYFIHNSQRCWTRMGRPPVAMSPPRCSWG

SEQ ID NO: 5541 - protein, 23 aa, Homo sapiens
VSTPLLSFLATLLQSSTNYPCPG

SEQ ID NO: 5542 - protein, 48 aa, Homo sapiens
LLLLLTTTTTTGAASAVPGVSSCSGHTAPGDCSSSNQNLGLTGTLAPK

SEQ ID NO: 5543 - protein, 32 aa, Homo sapiens
LSILGTNMLLFPLFLLLSLDLCQKEGYAESLI

SEQ ID NO: 5544 - protein, 71 aa, Homo sapiens
LTRRKVPSPLATSLPALTAHAVILVTEKRAEPLPEGRGQDPAGHLLSTLSSLWERQGQQREDLEPGLMTHL

SEQ ID NO: 5545 - protein, 86 aa, Homo sapiens
MDWQGRLPWAGCTGSASCATLTARKSQIPASVRSSSWRWQSSWSQKAGRMQVMSTSALMTVGWLPKEIQKADFRQTLSAFLMGFAS

SEQ ID NO: 5546 - protein, 25 aa, Homo sapiens
MMTSLTWGCSLCPGGLLCAAFCGTV

SEQ ID NO: 5547 - protein, 88 aa, Homo sapiens
MPPWPRGLSSGWRSCWWCSSGRSTWSASGPPAAAASTWASGGGCALPGSPFPSSTSSWSWPPWWSSAWAPRGRCLPRRPSGASASCRS

SEQ ID NO: 5548 - protein, 20 aa, Homo sapiens
MRALFRVYMFSTLFLASGNE

SEQ ID NO: 5549 - protein, 28 aa, Homo sapiens
MRGTRESPREPAKSLAAASRAAAAAAAA

SEQ ID NO: 5550 - protein, 71 aa, Homo sapiens
MEPLVVSSLLRAQASRQAHHPPAQEACGSRGALSMAAPLRHLRPPKSAARWMRTMALEKKCRRKASRFQLQ

SEQ ID NO: 5551 - protein, 44 aa, Homo sapiens
MEPLVVSSLLRAQASRQAHHPPAQEACGSRGTCTAPSLRMTWIQ

SEQ ID NO: 5552 - protein, 89 aa, Homo sapiens
MLISVSSSWFMCSGGFGVGGNADGSWGRGGYSSGYPSLESGPGRHGPTCIQKFPGVIVMVVGTGGCIRCSWKEGAGVGISWSLLSPMRL

SEQ ID NO: 5553 - protein, 94 aa, Homo sapiens
MRPGSPLAQRDSGQGRGRSGVASCSRGGWAAAAAAAAAAAAGAAAETMSGQRRGLPPPPPPPRAGSRDGPVARTSSASASASTSGRAAAARRLC

SEQ ID NO: 5554 - protein, 26 aa, Homo sapiens
MVKKGFPHAASLSPAPLATSQDLGCS

SEQ ID NO: 5555 - protein, 46 aa, Homo sapiens
MNRERKLKLSKRQQIDGILLCCLGWSPSLKRSSFLGLPKQWDYRAW

SEQ ID NO: 5556 - protein, 85 aa, Homo sapiens
MREQAAHQDFYGNLLLETAAAAAAAAARGLPAAGAEVLAARAPRPLPTARRDAHSPSTRKEVPSPVTGSCRVQIYTELHNQPKTT

SEQ ID NO: 5557 - protein, 34 aa, Homo sapiens
MQTWFQKFVFFWWVQLGLESPVFSIQSSLFFMAM

SEQ ID NO: 5558 - protein, 45 aa, Homo sapiens
MGFHHVAPAGLELMSSSDSPASASQSAGITSVSHHSCLYTSKGVE

SEQ ID NO: 5559 - protein, 106 aa, Homo sapiens [sequence omitted]

SEQ ID NO: 5560 - protein, 51 aa, Homo sapiens
MRRSSRSFRLQCTGFPSSSAQSISAHLSNSMPSSLLTISRCPGMFAVRCPL

SEQ ID NO: 5561 - protein, 45 aa, Homo sapiens
MGNAAWAASASIPRMAWPATLPTTAAGSPRTWLRNSAIYTTRSIT

SEQ ID NO: 5562 - protein, 29 aa, Homo sapiens
MGLFLPAPISLTPGSVRHSPASCGNHLKF

SEQ ID NO: 5563 - protein, 32 aa, Homo sapiens
MTMATMLFLVSLGIVLAVERKASVTSRNSPII

SEQ ID NO: 5564 - protein, 77 aa, Homo sapiens
MRPSPLSGILADPLFLFPFSEGLPRRRAASRSRLQTPSARCSPRPDAEVAASQKLGPLHPPSEKGAMLISGSTKGPS

SEQ ID NO: 5565 - protein, 28 aa, Homo sapiens
MCLWVLICPAIFTSNQEVELPLVFLLGT

SEQ ID NO: 5566 - protein, 84 aa, Homo sapiens
MVLRRAQLRPSLSEGQHPASRNPAFSGSTTAFSFPALSLSSPSSSFSSSSSSCSPPLPVLPSRTPGDRRSSLTPLKRQQQSPYP

SEQ ID NO: 5567 - protein, 52 aa, Homo sapiens
MAPGHKPRSAPVRAVPRPRGAGFGGTASPLSLAKPVSLQSCGCSFPYVCNRL

SEQ ID NO: 5568 - protein, 21 aa, Homo sapiens
MLNIGLFLQLRCIALTNQGLS

SEQ ID NO: 5569 - protein, 37 aa, Homo sapiens
MKNLLSSFFLTFSCEIQKGHIVSGHSKKERKKKKKGI

SEQ ID NO: 5570 - protein, 76 aa, Homo sapiens
MATLYLLIYSFCIYQMESHSVTQDGVQWRDLGSLQAPPPGFMPFSCLSLPSSWDYRRLPPRPANFCIFSRDRVSPH

SEQ ID NO: 5571 - protein, 52 aa, Homo sapiens
MATLYLLIYSFCIYQAMVQDPLEHAQLSYGKNKNTTFALLYTQNQQLFLRFA

SEQ ID NO: 5572 - protein, 34 aa, Homo sapiens
MATLYLLIYSFCIYQSCFHDFPVALSTFTSLYDC

SEQ ID NO: 5573 - protein, 33 aa, Homo sapiens
MYPQQPELPDMSVIAALLIILPTADPFCETPGC

SEQ ID NO: 5574 - protein, 25 aa, Homo sapiens
MKWFPSMATLVQISPTLKSSSSWKA

SEQ ID NO: 5575 - protein, 51 aa, Homo sapiens
MVAGAAAAAAAQPSVRCCSLRGVLQRTSPIYFCSRLGLSMCLLPPARGFDI

SEQ ID NO: 5576 - protein, 122 aa, Homo sapiens
MPVPACWISSSLSLLASHHSVSCSNIFLNFNPDHIRVQAQVYFTQESSILSSTLWNFCLLPQQRFCGREYVQAGWPCWLLQFFSQTYMHPMKTAGKPWLLRYPSLLEQQILSTYQMTPQSPS

SEQ ID NO: 5577 - protein, 84 aa, Homo sapiens
MIRSFWFYGKTLALLPSLERNSSVVSVALRLWSLGTGWSAVRSVAMLITRTAMFPGLQPLERERAHPGYAASVSLRSPPRGEVP

SEQ ID NO: 5578 - protein, 36 aa, Homo sapiens
MSRARRKSRIAPGRRRSPAAGGILPLTATLVVLCGC

SEQ ID NO: 5579 - protein, 93 aa, Homo sapiens
MRGRRGRAAPPVLPPLPPQGRAGRVQPGGGLGSPPGRRVLAAPCPARPAASAAALPAHGLGCQDVQLRRRLQDAAQGVPWRREQEVFHPKKCI

SEQ ID NO: 5580 - protein, 31 aa, Homo sapiens
MYLVTCFQAGSLSGPLAWGKPPHLLRVLFRV

SEQ ID NO: 5581 - protein, 50 aa, Homo sapiens
MLPFYMVLVWSTSIIMHFSGQLKHFRRCFMLIPAFVEPRKFIYDLGLCSK

SEQ ID NO: 5582 - protein, 78 aa, Homo sapiens
MRWTLGSANRAFCGLCGESWRRRLPVAGLGAAPVGGLLPGPAAQPSRRLGGHSQAGLRGSGSVDPSRQNSRSAAAFKT

SEQ ID NO: 5583 - protein, 50 aa, Homo sapiens
MTSSVHLLVFKDHLLSMLSCCQGACCPSTPHEGTRSTVSWIPPTYKAATH

SEQ ID NO: 5584 - protein, 26 aa, Homo sapiens
MFAVWRALSLAVETSVTLGRVYFFDG

SEQ ID NO: 5585 - protein, 55 aa, Homo sapiens
MRHRLVSLSVTSCVTPAAGTRRGSAGAVGTNTGRGGPPPHALRASGEQSPAQGVS

SEQ ID NO: 5586 - protein, 148 aa, Homo sapiens
MPRSAPRAAAAPARAPAAAAVACACCPNSAPDFFMVCGGHVRSLAGKRLFSSPPRPACSGPNDLRSSGVSGGAVRPAARTRRRAQGEVEEEASCGEKGRRTAERMGPVAAARAGLDAAWARRCEVPKVTTIPTRQPRAPARPGAPRRI

SEQ ID NO: 5587 - protein, 22 aa, Homo sapiens
MYRIVNLILDLPALVIVTHASV

SEQ ID NO: 5588 - protein, 59 aa, Homo sapiens
MPAAWPGAAAPWRCSLASASSGCAQGCGVRIQRSGWWSISWILPATTSLSAQPPMALSW

SEQ ID NO: 5589 - protein, 20 aa, Homo sapiens
MVLLLVTFLSMDDLLGTQNS

SEQ ID NO: 5590 - protein, 56 aa, Homo sapiens [sequence omitted]

SEQ ID NO: 5591 - protein, 34 aa, Homo sapiens
MIQKREPGMLCSSLPVGSGEAGGVAGLDGRHENS

SEQ ID NO: 5592 - protein, 43 aa, Homo sapiens
MGCFLLASGMGAFASEDLQCHNKHMPALFYREPWRSWDRGHID

SEQ ID NO: 5593 - protein, 26 aa, Homo sapiens
MPGDCLPLAVHSHSREDGIIYNPAHG

SEQ ID NO: 5594 - protein, 30 aa, Homo sapiens
MKSIQASLISTLRARSAELIRRAVVPRARG

SEQ ID NO: 5595 - protein, 19 aa, Homo sapiens
MNWILIVTLLFSPCVTLEP

SEQ ID NO: 5596 - protein, 29 aa, Homo sapiens
MTSHWPAQTCLCLSFLSSVSTGSFTRLHI

SEQ ID NO: 5597 - protein, 78 aa, Homo sapiens
MAASRCLRWPSCSSSAMSSCAVATLSGSASCPGLPVWRVTPPSPRDTSESRASASCWRVTTSMRCACLRTCWATARRT

SEQ ID NO: 5598 - protein, 49 aa, Homo sapiens
MCVALILNFGGILLCEADRHCKGPRVACLSLEMELNQIKSFHWRLVLTL

SEQ ID NO: 5599 - protein, 34 aa, Homo sapiens
IGSLLLIFLFYSVMFKLRNALCGSSESHLWFSRH

SEQ ID NO: 5600 - protein, 64 aa, Homo sapiens
MTSWASRGTLEAVSAGRMRRRRRRRKQARRPRRRRARQARLTTGATSGRRPQEPAAGGDSTAEL

SEQ ID NO: 5601 - protein, 10 aa, Homo sapiens
LFVLVLDLCL

SEQ ID NO: 5602 - protein, 39 aa, Homo sapiens
LSPLPTLPPLTLLLTLLEPCLPGGPISSGRPCLWATWSV

SEQ ID NO: 5603 - protein, 43 aa, Homo sapiens
LGIQLSNFLFLVWLLWCAKLRTLLFCHTATPYRCGRCEICHQL

SEQ ID NO: 5604 - protein, 11 aa, Homo sapiens
IQTLSVILTFF

SEQ ID NO: 5605 - protein, 35 aa, Homo sapiens
LWKTDPLDKRHVWGKRGFLMLFWMFPKSTAAALPP

SEQ ID NO: 5606 - protein, 29 aa, Homo sapiens
MFGQLAVSLLSCCQECLCGQENRMWISCI

SEQ ID NO: 5607 - protein, 141 aa, Homo sapiens [sequence omitted]

SEQ ID NO: 5608 - protein, 44 aa, Homo sapiens
LSLEVIMIHSSSVILIVLNCVSLRIVTDEPYVSLYQCRHDFRYL

SEQ ID NO: 5609 - protein, 47 aa, Homo sapiens
MPESTPSGRQKSLTSAAMCLALCAKGQVRREQDRTSAALWNSAGRSW

SEQ ID NO: 5610 - protein, 23 aa, Homo sapiens
MPYSTMQRVFLCLFCTLVNYVPP

SEQ ID NO: 5611 - protein, 150 aa, Homo sapiens
VLLLLSSIVGFFLMQSVTRPGIPMCAQLAHSIIVPRKLLQFIKSSGLGISLNSKRRKEETFPTRCGCDASQGPQGHCPRAHRPPLTATGAWIRSYIVQSFRPLPWSTRTRARISGRAHTHSYTRTQTRGRRQVGNFVRRSQRRSASSCSS

SEQ ID NO: 5612 - protein, 44 aa, Homo sapiens
MAPGGPSMPWVRSACPVCAMSVPGPFLPWAGPQEEPVGVERGLR

SEQ ID NO: 5613 - protein, 57 aa, Homo sapiens
LSTSSPTLIIFLFLFLKKISYGHLSGCEVVSHCVFYLHFLCNELETKVQTRWDIQSL

SEQ ID NO: 5614 - protein, 322 aa, Homo sapiens [sequence omitted]

SEQ ID NO: 5615 - protein, 32 aa, Homo sapiens
LRDLKLFFFVFLWVQFEREVFDPFFSEWIICS

SEQ ID NO: 5616 - protein, 82 aa, Homo sapiens
LELMSRPAAAAAAAAAALSFVSRAVWARAGVPGTPPPPSFPQDSSLLALGPNGARLPGGRSAHRARLPLLLPDHLVSTRNEI

SEQ ID NO: 5617 - protein, 81 aa, Homo sapiens
MSRPAAAAAAAAAALSFVSRAVWARAGVPGTPPPPSFPQDSSLLALGPNGARLPGGRSAHRARLPLLLPDHLVSTRVCLHY

SEQ ID NO: 5618 - protein, 58 aa, Homo sapiens
MVCISVAMTTQQQLAWASYQSTNVLLTRCLSDFARQFSLLDSHKRFRRLLTAFRGETG

SEQ ID NO: 5619 - protein, 28 aa, Homo sapiens
LVKPLPTLTFIIVAPSLPSSVPQISNKR

SEQ ID NO: 5620 - protein, 17 aa, Homo sapiens
MFSLFIGLLSLLSHPPH

SEQ ID NO: 5621 - protein, 41 aa, Homo sapiens
MCAATIGPLPQAACEPLSLSALAQAAPIFVSLPRLIHPGFI

SEQ ID NO: 5622 - protein, 147 aa, Homo sapiens
VGVSSPLSLLPSLARTLAVSSLCRDCQSVRLQRGGDGRLCHGFMRAGTGRRTCRRRGEETWSRPLALWGRVGQSVGEAGGGDRTGWGWTPGFWERAGSPDARVPKVSGVAISPDPPRGRSAGQRGGGWGEAWPERCWKRSRDLWGPR

SEQ ID NO: 5623 - protein, 162 aa, Homo sapiens
MPRYVPLLLLLLLLRCSERGGGVNFGEKDAKVPGTWRDGVRVPGEGASWDSDRASPERRYGIVGLSQSISTKHPETSPKDSRIRENDVTADGRTTEDHITADPGTTEDSVTADPGTTEDNVTVDPGTTEGSVTADPATTKDYVSADPGTTKDSVTADPGTTH

SEQ ID NO: 5624 - protein, 26 aa, Homo sapiens
LRVMESRTLLLLFSGAVALIQTWAGP

SEQ ID NO: 5625 - protein, 132 aa, Homo sapiens
MLLRMSEHRNEALGNYLEMRLKSSFLRGLGSWKSNPLRLGGWTILLTLTMGQGEPGGPQGDPWVPHELLLPSLCDSSHASSWGSGSITCAWRGGDSSSHPLVSGHILSNSPVAAVMCSSMGTHLSPFKGTLL

SEQ ID NO: 5626 - protein, 136 aa, Homo sapiens
LVSLFLLFLFLFLFLFLRQSLTLSPRLQFTGVISAHCNLCLPGSSTSRTSDSRIAGITDRHHHTQLIFVFFVETGFRQVDQPSFKLLTSGDLPALASQSAGITRMSHRAWPILLYCNIFYYISHHACPIFLCFNIF

SEQ ID NO: 5627 - protein, 38 aa, Homo sapiens
MSEVATLLFSQTALASLESVHPAGHKLWMRNLRQVTSP

SEQ ID NO: 5628 - protein, 23 aa, Homo sapiens
LFFLLLLLFLLLLVVVVVVVLNF

SEQ ID NO: 5629 - protein, 123 aa, Homo sapiens
LGLLSLSGSIFSAAGGRGLLWGAQPVSQVSLQCRGEPPGEPGAGGRRAGVGAEGAAAPASLGGEVTRRGEGRSREGASGPPPSYGRTATGAAPSRRGPGGPGIGEWGAWGPWRASRWRRPRWG

SEQ ID NO: 5630 - protein, 31 aa, Homo sapiens
LWAWPSLISALALLYRSRRRYSWRRGKERWK

SEQ ID NO: 5631 - protein, 63 aa, Homo sapiens
MMAQKSKFRVLFMSDPHGTAMPLTSAILESSRASLAAKQEDKCFTDIRNLKWKHFLEHTKQPP

SEQ ID NO: 5632 - protein, 66 aa, Homo sapiens
MNLNPRLRLQVISFHPHPKALAVTLLPALTQSLCLCMASCVYSGPKGFLFLFFPQTAQEKHMKNIT

SEQ ID NO: 5633 - protein, 23 aa, Homo sapiens
VRALTAILWKPPSSLAQASVVAP

SEQ ID NO: 5634 - protein, 39 aa, Homo sapiens
MAARSSSGVAAAEGAAALAAAETAAVTVAAAARDLGLGE

SEQ ID NO: 5635 - protein, 21 aa, Homo sapiens
VLYSVLGMHVILTQWLLLTNR

SEQ ID NO: 5636 - protein, 53 aa, Homo sapiens
VEGGVRACACVLVCVHVCVCLCGRVRQYEQTMITVTLQEVVDAPGQPPPCSSF

SEQ ID NO: 5637 - protein, 59 aa, Homo sapiens
LLLLFALYPMRLGDRSPGFEPCLPPLPNVGTQARPFYLLGLSFHVCTTRGLTRWPQVFL

SEQ ID NO: 5638 - protein, 28 aa, Homo sapiens
LMPNWRPFSCLLPPLILAFPGVLPSPEL

SEQ ID NO: 5639 - protein, 23 aa, Homo sapiens
LARVEDQGTEQKSPWWPECQVSS

SEQ ID NO: 5640 - protein, 14 aa, Homo sapiens
LFSLCFVSVHLLIR

SEQ ID NO: 5641 - protein, 54 aa, Homo sapiens
MLPGLRAVAPGAEGGAGAAEAGKPRTGLLAGHSALHGRSVNGDYSSIYRELAVG

SEQ ID NO: 5642 - protein, 41 aa, Homo sapiens
VSPSTSASAPAATRAPSAAAALLLLKAAAAPWAKRFSNGTF

SEQ ID NO: 5643 - protein, 37 aa, Homo sapiens
MSPTSLLLLARLYFTWDMLLCWDSCMSTGLSSTCSRP

SEQ ID NO: 5644 - protein, 51 aa, Homo sapiens
IEVQFMCLWVWMAQSVSGLRKADLAPTLTLTDPGIYSRNWKPSATGAWRSS

SEQ ID NO: 5645 - protein, 32 aa, Homo sapiens
LAQCPSPLLAFCCSSTFLCIEGLTLGWEDDKT

SEQ ID NO: 5646 - protein, 17 aa, Homo sapiens
LKEYRVFFLLSFIYVEI

SEQ ID NO: 5647 - protein, 63 aa, Homo sapiens
MCSSGVPSPPASHCPCLPKTSSLSLLCPPPPPSAFALLSSFSPEVRAASSPLVLFLPSLCSLL

SEQ ID NO: 5648 - protein, 71 aa, Homo sapiens
LTSRTQKLITTCLSRWLQKEMKKVFLLLLLTCQDCGRRMTSRGQNACCSRRRGWAAGSLSQPQMLSEGTPS

SEQ ID NO: 5649 - protein, 35 aa, Homo sapiens
KSLISSLFLLQDPEALSLSPWSSAGPWPCWGAPWA

SEQ ID NO: 5650 - protein, 63 aa, Homo sapiens
MALRCGTHWLPTKAPIRRLPHCKTTWLSLCTAMSPLTTEIWALRRGNSSASWSRAASGGRRSP

SEQ ID NO: 5651 - protein, 55 aa, Homo sapiens
RSSLIEVQFMCLWVWMAQSVSGLRKADLAPTLTLTDPGIYSRNWKPSATGAWRSS

SEQ ID NO: 5652 - protein, 84 aa, Homo sapiens
LNARPALDLTDTRLDRLLHIRPRNGPLEKGFFKPAALSSVLASGIAFPGNLASDIAHHPALFTVPGSSWRNDISENADSYVHVI

SEQ ID NO: 5653 - protein, 44 aa, Homo sapiens
VAHHRRGGRRSSLIVPGAVTTVGPSAQSAQPLSVLPNPHNRPRL

SEQ ID NO: 5654 - protein, 22 aa, Homo sapiens
IVLILLVVLLTGELNMYLQESG

SEQ ID NO: 5655 - protein, 103 aa, Homo sapiens
MRRKRHPWKMTRIMSRHPPMTRKLCRTPSCLPSLSPTPTPCTSTGPPLGKPPSSLLCPPRDRWPPSRPHQPAGITRHCPHPRPTTKNPAEAETTKRQSSLLLQ

SEQ ID NO: 5656 - protein, 29 aa, Homo sapiens
KVKTLKDRHFWQSSVFCAWTLWAHPGHGG

SEQ ID NO: 5657 - protein, 40 aa, Homo sapiens
VVQPVKTMVPPLLCLSPLSPSRASVQIDHHQNLCGFLTFE

SEQ ID NO: 5658 - protein, 30 aa, Homo sapiens
ISCFLLLSFLILSKFSDSRKRNHSPLPPTT

SEQ ID NO: 5659 - protein, 53 aa, Homo sapiens
VQRGAAAGRPSRAHFATLTVPAVAVEVGTAAASSPLVTAQARTPAEPLGCALP

SEQ ID NO: 5660 - protein, 52 aa, Homo sapiens
IFLLLLLLLLPPPLPLGSFAPTPSRRPAPSPTQDVRGFSKAAGKLQSSAPAS

SEQ ID NO: 5661 - protein, 38 aa, Homo sapiens
MSLFSTCLSVFQSLELPSPHDCVPTELLSVLIPLPTSA

SEQ ID NO: 5662 - protein, 28 aa, Homo sapiens
LSFSLSLSLCPFLLDRSTVIHRNKHTRT

SEQ ID NO: 5663 - protein, 69 aa, Homo sapiens
MMKLQLPLQLSSVWILRATTYTGRIKVRRWSFWISPASGILALGSLPRCPRARSSGTSSTWTFLITVSC

SEQ ID NO: 5664 - protein, 7 aa, Homo sapiens
ISFFFFF

SEQ ID NO: 5665 - protein, 34 aa, Homo sapiens
IHFLLPISLKGLLLVGLLCTVLQVSSAKGASRGK

SEQ ID NO: 5666 - protein, 52 aa, Homo sapiens
RGLKMGHFLSSPSCSVSALGPAISCCPWASASCCWSSSVWLDSKIPNFRGTW

SEQ ID NO: 5667 - protein, 50 aa, Homo sapiens
TPATPAALRTVLAVAAAAPVSRWARTQPLGAVAFPASQRQKRGSGTQKVA

SEQ ID NO: 5668 - protein, 42 aa, Homo sapiens
MRPPSAPPRRGCIPWQGLLLTGSWAKGTCLVSEETWDFGLYW

SEQ ID NO: 5669 - protein, 94 aa, Homo sapiens
MRAPRPPAPAPGAPGFGSILPAPVPAAARSRGQRPSGGWKRRGENTPSAVTTLTPLTVMRHLHPHQDAPNCPAAPSRAGPDRTKRSPPRFSGQT

SEQ ID NO: 5670 - protein, 29 aa, Homo sapiens
RRWLFGGSEERLLLLLLLLVAPLQMYCCP

SEQ ID NO: 5671 - protein, 24 aa, Homo sapiens
LLPLLLLLRLLAEAGGSSGGGGGG

SEQ ID NO: 5672 - protein, 89 aa, Homo sapiens
MARPPACSCAWTPRSRFGCSSACTGPSRRSASSAPLSWPSGVSHHSPAPLPPRQPRPVPWAAACLTPCSARAALALWVALLVGQPPIRQ

SEQ ID NO: 5673 - protein, 37 aa, Homo sapiens
IRWICCSSYTMSVCWLLSASGTASEWVMQCWPSMAWT

SEQ ID NO: 5674 - protein, 45 aa, Homo sapiens
MRPPGLLSVSPTSCAQFSGAAGLTSQVFPEPVPSSWAALPPRAPT

SEQ ID NO: 5675 - protein, 12 aa, Homo sapiens
IFLIFSYIFGFV

SEQ ID NO: 5676 - protein, 51 aa, Homo sapiens
VPVFAHLSILQSLVPAAGAASPVAISAQHLCYSHVTPGDPGAGAGQGPAPS

SEQ ID NO: 5677 - protein, 82 aa, Homo sapiens
LVLHPSRHSAVSCLGVAAAMARKALPPTHLGQSWFCSCCRDTELAISALRARTATGSPGSCRCTAGPLPCASALESCCCRVT

SEQ ID NO: 5678 - protein, 21 aa, Homo sapiens
MSLFIARLYMMLCKTWIRRLM

SEQ ID NO: 5679 - protein, 38 aa, Homo sapiens
MKSKRHVEAIITIHIPLIPAAAPAGSGAEHDNSDAQWE

SEQ ID NO: 5680 - protein, 32 aa, Homo sapiens [sequence omitted]

SEQ ID NO: 5681 - protein, 29 aa, Homo sapiens
MLLCLLQLAAPLCSYSITIRFYLFWLNTP

SEQ ID NO: 5682 - protein, 27 aa, Homo sapiens
MSSSLWTTTAVSTWTASLLRSRPSTRI

SEQ ID NO: 5683 - protein, 34 aa, Homo sapiens
RASATCMMWIGEMVCPPSHGMSLLCSGIFPSLGF

SEQ ID NO: 5684 - protein, 76 aa, Homo sapiens
MRTPGPPRRGSRRSLLPRPAPCPPTRSPWPLAASGSPALTTTSTSASWARRAAARSTCWTSPSTTTSSVARWIHTT

SEQ ID NO: 5685 - protein, 36 aa, Homo sapiens
MHGSDFPPRLCLHSMSLWGSWGSRPPSPAHSREVAS

SEQ ID NO: 5686 - protein, 30 aa, Homo sapiens
MLSHGKGRHRVAVVSGHLFSEGSAWSTIST

SEQ ID NO: 5687 - protein, 71 aa, Homo sapiens
LSLFLVPSGAFPILVLRSSRSELVRRGWELVPAEIQWEEPAAARATPPLERILKEMKSALRNEVDCLLAFC

SEQ ID NO: 5688 - protein, 19 aa, Homo sapiens
IGLVLLVFIHCGSFSLPPP

SEQ ID NO: 5689 - protein, 14 aa, Homo sapiens
LPISLVIYFYICFL

SEQ ID NO: 5690 - protein, 20 aa, Homo sapiens
RHHFLQLRPNILMSLQLLIL

SEQ ID NO: 5691 - protein, 37 aa, Homo sapiens
MGTQMIHEFALVSLAQVVCANHVCLHSSVLPCVLNKK

SEQ ID NO: 5692 - protein, 15 aa, Homo sapiens
MKIKSLFICFSFSLV

SEQ ID NO: 5693 - protein, 31 aa, Homo sapiens
VPLPLLPPPLLLLLAPSLHQPEALCFPSWIC

SEQ ID NO: 5694 - protein, 32 aa, Homo sapiens
KQSKPGHTILPQAQLLSCLPTPWGAISAPNSA

SEQ ID NO: 5695 - protein, 16 aa, Homo sapiens
LFPRLCPLALPSLLVL

SEQ ID NO: 5696 - protein, 18 aa, Homo sapiens
LSCWLIRFMCMKSMLIGL

SEQ ID NO: 5697 - protein, 71 aa, Homo sapiens
VDVAFAPTGASESSSPQDELQPPRESSARHQVTRPQPPGPQLRPASPRSGSCTLTLDSAAHGKNRIAPACN

SEQ ID NO: 5698 - protein, 49 aa, Homo sapiens
VGTGRVAHHRRGGRRSSLIVPGAVTTVGPSAQSAQPLSVLPNPHNRPRL

SEQ ID NO: 5699 - protein, 81 aa, Homo sapiens
LALLTSPNDPCCRKMSRGTIPAMKRECQYNSHKGSSCGPQTKNHCITSAGCIGEKGAGTEKPEINHLSFLEKRMLRLSRFG

SEQ ID NO: 5700 - protein, 81 aa, Homo sapiens
LALLTSPNDPCCRKMSRGTIPAMKRECQYNSHKGSSCGPQTKNHCITSADCIGEKGAGTEKPEINHLSFLEKRMLRLSRFG

SEQ ID NO: 5701 - protein, 17 aa, Homo sapiens
LLTLLIFWPLLGFLSPF

SEQ ID NO: 5702 - protein, 26 aa, Homo sapiens
MWCARFPCIVLLTAAPLPLSMTPKQI

SEQ ID NO: 5703 - protein, 166 aa, Homo sapiens
VRDWAYATTGARCLSLSVCGSVLVVLPSSFGICSALVCPRPPQAPMIKSSSLTRACPPHPRQQGGEWGNKITTKSLGVSHSPSPGTLSETLQSPRNSLREAGRRPAIWTKLRYADADRAALRGEDPGGASSAGSSSQKTDDPERVAGTDCQAFGGRRGQSFAGSES

SEQ ID NO: 5704 - protein, 77 aa, Homo sapiens
LQDLVWSGRRRDMSSLWALILVGIFIHQVHKCNFKPSATFSKLFLHLLQSYSDGKNFLCFSSLIYYFFKLQEQCILL

SEQ ID NO: 5705 - protein, 24 aa, Homo sapiens
MQEMVLLVAATGLRSPLVRDGSDL

SEQ ID NO: 5706 - protein, 47 aa, Homo sapiens
LWRLCGAAALAGVGSWCEVRGAVVAPRRGQVSVGRRRVPEVTGSWFF

SEQ ID NO: 5707 - protein, 206 aa, Homo sapiens
MRFVGSTVPLSAAGCADGPGSPASRPLPLPSLPFSLFLSCLSAHPPQPHRRGVASLVALLSCPLCVPLSSLGLQKGRGGGWGASGEEGKSVGYELAGDARLRARRELRANPGPRSVPPRCLGVARAGVASPSAQRRRGGACAVQDPRGPRGSQGAAGPVSLCLQSLGPVRSAPRAPGEDNRCLLPHPGSSGGSPHARWRHCAYRQR

SEQ ID NO: 5708 - protein, 57 aa, Homo sapiens
MLRSNTLAICMLHAICWQFLSDIKMKQYSWTEDTEFLIPVGLVLFSVSYNCTWRNRY

SEQ ID NO: 5709 - protein, 46 aa, Homo sapiens
LHVSFCLALLALPKGNFALPGCFFSAVVEYMEVGDAEFSGSSVADF

SEQ ID NO: 5710 - protein, 92 aa, Homo sapiens
VAGACTLSFAGLLSQSELPAGPPLQPLSFLELCADWCVSTPGPLPMLLMVSFLCTLVVATVNADKIADADCLPSCECWHGTSSPDGHWKWLG

SEQ ID NO: 5711 - protein, 63 aa, Homo sapiens
VALMPLFRVLFSCTCALLQDFRMQPCPPTPTSQGRPVLLGRQTSQEYILHNYTNRPLFKAFGL

SEQ ID NO: 5712 - protein, 164 aa, Homo sapiens
MWGCDCYSTFRRRVSALLLRLRLALSPAWPRGMPPGRSADVTAMLCTSSSPSPLHFLCGAHLLLRQGACAAGRPDSSQPAPPPRLRPPLPPRRVCTTAEARRANAGSPELGVEIKQTMTFPFPAGHSQVKTHLRTTSVVSDPCSPPHPQASAVNLNVLFQDFSP

SEQ ID NO: 5713 - protein, 67 aa, Homo sapiens [sequence omitted]

SEQ ID NO: 5714 - protein, 59 aa, Homo sapiens
MCGRTWLLTRVVTGVAAAEDSHPFFVSAERRLHGPSSLQLFHLLPCVEPGFCTESEMPF

SEQ ID NO: 5715 - protein, 39 aa, Homo sapiens
MGSPWKLLSGGGTCSPGLTPSCIGESEPGRDRAVGESLR

SEQ ID NO: 5716 - protein, 70 aa, Homo sapiens
MKLQEGHTVLLSLPLRLAGTETAEHGGPSYPFTDSALRAGEDGPDLPRALAAPRAPRAHPAGLCGAAAQP

SEQ ID NO: 5717 - protein, 138 aa, Homo sapiens
MSSWSPRRAGGPTRPCTALQALSIPARCTPSRKPWPCWSPMRGCPRTSMWLGPLRSWLVPSSSTPFSLGPMGTCTAWCEAATVSLSLRLPCSSARWPPPWRTVTSTVWSCVISSCVALSSLTVRGRSWCWRTWRTPAC

SEQ ID NO: 5718 - protein, 113 aa, Homo sapiens
MSPSPRWGFLCVLFTAVHPAPSTAPVQDKCPVNTWEAMQASSQQLLQTDPRPKPFLLPPLPPLLLISAGTEVSSLVFQKSPLHTQPEGAIKTVGQPTSVHSKVLSKGSLLLGE

SEQ ID NO: 5719 - protein, 40 aa, Homo sapiens
MTSWHPALLHICPTGVAVAPSCKAMLKKLWKQEGSMDSKN

SEQ ID NO: 5720 - protein, 114 aa, Homo sapiens
MRLKSSFLRGLGSWKSNPLRLGGWTILLTLTMGQGEPGGPQGDPWVPHELLLPSLCDSSHASSWGSGSITCAWRGGDSSSHPLVSGHILSNSPVAAVMCSSMGTHLSPFKGTLL

SEQ ID NO: 5721 - protein, 45 aa, Homo sapiens
MFAKSLLSPNSLLLAVSLCQLLLSIGEDCFSSPLNMGWACNLLDQ

SEQ ID NO: 5722 - protein, 27 aa, Homo sapiens
MRRQEETTGTHIAGMQMGSVLLTLAMG

SEQ ID NO: 5723 - protein, 51 aa, Homo sapiens
MRRPLRVVLFLHPLRLGLALGFSGYLDTPFLCGQVSRGSQHQQPTLGHTSL

SEQ ID NO: 5724 - protein, 30 aa, Homo sapiens
MRPYRGLTLLAGFPSSRGRGLCFYFRIPQL

SEQ ID NO: 5725 - protein, 39 aa, Homo sapiens
LATLLPSLCIFAVPPYTSFLTAVLISCRKIFSFHFLQGG

SEQ ID NO: 5726 - protein, 23 aa, Homo sapiens
MPLRSGITPLLSAAWATVLILCW

SEQ ID NO: 5727 - protein, 34 aa, Homo sapiens
MSSSQAAASLWVTSMRHPLPPTWTSTCTSCAPIT

SEQ ID NO: 5728 - protein, 75 aa, Homo sapiens [sequence omitted]

SEQ ID NO: 5729 - protein, 38 aa, Homo sapiens
MCGKGMGMCGLGAGAPTHSGGQAVSRTTCCKAREGRRR

SEQ ID NO: 5730 - protein, 60 aa, Homo sapiens
MVSHRKDWRRVNLRFSSCLLLSICLDDKPSADELCFWTDHGRSQLTCPSLGVSQGHARSS

SEQ ID NO: 5731 - protein, 57 aa, Homo sapiens
LKLFSSKVLKVNLRFSSCLLLSICLDDKPSADELCFWTDHGRSQLTCPSLGVSQGHL

SEQ ID NO: 5732 - protein, 33 aa, Homo sapiens
LLTASVGATTAAVAAAILMAGRVRFWDSWRQWW

SEQ ID NO: 5733 - protein, 28 aa, Homo sapiens
MLESFGTPLISLLLLTFIYYFSKCESNT

SEQ ID NO: 5734 - protein, 20 aa, Homo sapiens
VESLLLLFVSLWRGFCGPEP

SEQ ID NO: 5735 - protein, 26 aa, Homo sapiens
MVAAVGDVQFFFLFPSTDAEQTCLSA

SEQ ID NO: 5736 - protein, 84 aa, Homo sapiens
LLSAGPLSLGLMTSLLCGTSRFLPTVNSGPPSDHCSLRTRPGLGRADPNKGKMVNANVPLQFYRQCAVVPPPPLRVLVGTRRGL

SEQ ID NO: 5737 - protein, 32 aa, Homo sapiens
MNFFHLLWRQFSFSSVIPSCYSVPSHPVFLGK

SEQ ID NO: 5738 - protein, 39 aa, Homo sapiens
MGDVLLSCIQILPTKAITIKKHKNLSMLAVIFECLWLSE

SEQ ID NO: 5739 - protein, 42 aa, Homo sapiens
LAQGRRLHHISDTSLSFSPLLLPPAHIASPLPPPSPAGLLAS

SEQ ID NO: 5740 - protein, 26 aa, Homo sapiens
MALLDLLMLSLIKTLQHFSQAVFTHY

SEQ ID NO: 5741 - protein, 30 aa, Homo sapiens
LNMLYILMNSEKECGVSLQMSSSVVSFPLQ

SEQ ID NO: 5742 - protein, 12 aa, Homo sapiens
LFCLFVFCFFLS

SEQ ID NO: 5743 - protein, 50 aa, Homo sapiens
MAGACPLCPAAACRAGSHPTSPSPSRHPRKRPRPLASRTACCLRVFRIGG

SEQ ID NO: 5744 - protein, 37 aa, Homo sapiens
MNMKKCPMSLLATLFCGSSHWWCLGSPLSSGSWAMGL

SEQ ID NO: 5745 - protein, 117 aa, Homo sapiens
MGAFLLATSLKWNLLVALLPLQLWCYTEKLEETGFHYVAQSGPKLLVSSSPPISAFQSARIIGMSHYIQLLLVSSDSCFDTTDLSFKTDKGKRETSESLIKVEASYFYQRIHCAWTL

SEQ ID NO: 5746 - protein, 120 aa, Homo sapiens
TARSWSEASRAERARRWGREDAQVAALPCRTVTATAGVAAAAPPNGRSRPSSAAWPTACTCASTWSGCNALTRAARAAAAASSSRGRSGPTAPSLLKVMQMKSFCLIFHLRAMSSSKASL

SEQ ID NO: 5747 - protein, 10 aa, Homo sapiens
LITFQFCFVF

SEQ ID NO: 5748 - protein, 29 aa, Homo sapiens
LCTFSFPSCLFFFVVLYSCCLSTMCQTLC

SEQ ID NO: 5749 - protein, 16 aa, Homo sapiens
IKYWSKKLVTFLYMVR

SEQ ID NO: 5750 - protein, 20 aa, Homo sapiens
LTKVPWSFMSQHILLFLFLQ

SEQ ID NO: 5751 - protein, 11 aa, Homo sapiens
MFIVMLLIMHC

SEQ ID NO: 5752 - protein, 27 aa, Homo sapiens
LDFQWQLQWPFMWLAVSLVVTSTQLCL

SEQ ID NO: 5753 - protein, 26 aa, Homo sapiens
LERGLLKITAAAFGLGSVLSACARTG

SEQ ID NO: 5754 - protein, 16 aa, Homo sapiens
LYWVSLMPAWTILEAV

SEQ ID NO: 5755 - protein, 35 aa, Homo sapiens
THHRLAFQDTSCISDLLHLCYLGTSVILAASTCLS

SEQ ID NO: 5756 - protein, 20 aa, Homo sapiens
ISKYTRLIFRSFSVLLSVVV

SEQ ID NO: 5757 - protein, 74 aa, Homo sapiens
MSFFILLFFKHQILLFFFFLPSPQIPSQIILLTTIPTGRGELKHLLPLPCFSFIFYFFASVLMFLHTLHLYSKV

SEQ ID NO: 5758 - protein, 45 aa, Homo sapiens
RRRLCGAELRRTSQLGQWLRRLPAPPLRFIWIQGWLSTVPAALSS

SEQ ID NO: 5759 - protein, 24 aa, Homo sapiens
LFFVVYFCIFTCGAVASPHIKYRT

SEQ ID NO: 5760 - protein, 11 aa, Homo sapiens
LLWLYRITLCL

SEQ ID NO: 5761 - protein, 55 aa, Homo sapiens
IVSQCILPSWLPTLAAKAAATCCSLHSFGKRKGTSDLPDRFLSQQTICRRNKDGC

SEQ ID NO: 5762 - protein, 168 aa, Homo sapiens
VSFLHILWGFCTPSRWGLASSEPPLPLGFPSSGCSPYPLGAPRSQVGVFLLGTPQYVLSSLTSGAPLCFPLVCPLSLSLLVLSQVSEHPHFSGSGSPALLSLPLCAPTSVSVVSPLCASCAEGPPLSLLLCLGPLAPPCFFSPSPLSPLLSAPCLPLPFSVFAGSLGL

SEQ ID NO: 5763 - protein, 14 aa, Homo sapiens
KPIKVFLLLGAIIF

SEQ ID NO: 5764 - protein, 18 aa, Homo sapiens
IHCLSLVFYSPWLLLISR

SEQ ID NO: 5765 - protein, 10 aa, Homo sapiens
ILLMYYFTLQ

SEQ ID NO: 5766 - protein, 45 aa, Homo sapiens
MGLTPLRPGLHPHLPTSPTTATSPLRPSTLASLIVAPSGVCQGLG

SEQ ID NO: 5767 - protein, 37 aa, Homo sapiens
IQLRLSSESSHMVALGRSLARRVMPAILLLKYLPGME

SEQ ID NO: 5768 - protein, 26 aa, Homo sapiens
IKKRPLIRRRLLVSFLGTHSGFLQSR

SEQ ID NO: 5769 - protein, 15 aa, Homo sapiens
ILLFILCLMHSYFTP

SEQ ID NO: 5770 - protein, 10 aa, Homo sapiens
IGYLVYTLCI

SEQ ID NO: 5771 - protein, 26 aa, Homo sapiens
VDFALLLSWSSVLELVLSLSLCTFPV

SEQ ID NO: 5772 - protein, 132 aa, Homo sapiens
KWPLLPAVVVQCRVRAASVASCKESLRGPKSAALLLAFASSSSRFPTVKSQRHLQRPPGPTETDPQRLARSCLLHREPPSTGEGLAGGVGRWRRRHGEVPEGRPGRCRSYVTLPLLHGPVSVRRWETRRPNP

SEQ ID NO: 5773 - protein, 11 aa, Homo sapiens
LHMSAWLFLLF

SEQ ID NO: 5774 - protein, 33 aa, Homo sapiens [sequence omitted]

SEQ ID NO: 5775 - protein, 58 aa, Homo sapiens
LTRSQAGLMASLKLMLSAGPFVGWVSQMIPFSDWPRPMASSQRTFDWRESQMWNICHK

SEQ ID NO: 5776 - protein, 29 aa, Homo sapiens
MILKGFLLMVAFVLSSKILFSVVCKQVFF

SEQ ID NO: 5777 - protein, 41 aa, Homo sapiens
VVCALSSLPTPALPSAAVSLPPGPPCLQEHLCARVPGPRHG

SEQ ID NO: 5778 - protein, 39 aa, Homo sapiens
IIRSDVKLASQALITTWPTPWPAPLASAARAALRPLRRS

SEQ ID NO: 5779 - protein, 56 aa, Homo sapiens
LAASVLTLVTLGRSLTLRALWHPRLKGAVILQPCWGSSLDQAMVVKNVSQGQKTTQ

SEQ ID NO: 5780 - protein, 36 aa, Homo sapiens
MFANGVALWSCVSSELHCDVVGWGPTLLPCLPVAFL

SEQ ID NO: 5781 - protein, 32 aa, Homo sapiens
MHILSLSLFLSLSLPLLPSLPPSLSFLQKCQV

SEQ ID NO: 5782 - protein, 16 aa, Homo sapiens
KISRALAELHLLAFLA

SEQ ID NO: 5783 - protein, 14 aa, Homo sapiens
VVLGVLLTIILVPG

SEQ ID NO: 5784 - protein, 16 aa, Homo sapiens
LILPVLSLPAVLVVLC

SEQ ID NO: 5785 - protein, 28 aa, Homo sapiens
MGTLGSLGVTMLHLLFICLGKSCSSHTL

SEQ ID NO: 5786 - protein, 31 aa, Homo sapiens
KLTLVLALGVMSRDGGTDGDACTCVCMGAYV

SEQ ID NO: 5787 - protein, 15 aa, Homo sapiens
MLKFLWGSIFALAFW

SEQ ID NO: 5788 - protein, 12 aa, Homo sapiens
IWLFIQISTYLT

SEQ ID NO: 5789 - protein, 51 aa, Homo sapiens
LALWRLGGAAAAAAAAAGGPFADVLLSLNISPFENAWEVQPSVCPSTNLLC

SEQ ID NO: 5790 - protein, 39 aa, Homo sapiens
KMLGCLLVVFLCCLILGKLLCKAKNPVNTILSFTGRHYW

SEQ ID NO: 5791 - protein, 66 aa, Homo sapiens
LGRPPVGMGLSVLLPLCLLGPGRFTSGQKPLDTPGLGAAVLSVRKAGLKMRSHLTPSVCTVPSPGS

SEQ ID NO: 5792 - protein, 8 aa, Homo sapiens
LLPFLVLL

SEQ ID NO: 5793 - protein, 46 aa, Homo sapiens
ISANLGFWVLASFLLFVDFGVQVPQLLRAAEDLLGPHINEAATWRV

SEQ ID NO: 5794 - protein, 56 aa, Homo sapiens
ILLLILQFQRLLHSLGMTRTPSPATVAVRQLALRVCPAWSLATTCGPARMAAMSWA

SEQ ID NO: 5795 - protein, 15 aa, Homo sapiens
VFFFWFLFCFSSFKG

SEQ ID NO: 5796 - protein, 117 aa, Homo sapiens
LRRTLRGRGAAAAVVAAAAGVGAAAGPGGWSWRGGVLAVWRGGRRQGPGGAPGSRRCWTGGCSGAWAGGPAAGRPGPAGPRYDKIRTPARTTRRCRLEPLSPRTWWQAPWQGSWSTA

SEQ ID NO: 5797 - protein, 24 aa, Homo sapiens
MWWVLTLFFHKTMWVSMVAINKTP

SEQ ID NO: 5798 - protein, 20 aa, Homo sapiens
MSGAFLYSVIFCAVFLLDVS

SEQ ID NO: 5799 - protein, 62 aa, Homo sapiens
IVSQCILPSWLPTLAAKAAATCCSLHSFGKRKGTSDLPDRFLSQQTICRRWLFAFIRNKDGC

SEQ ID NO: 5800 - protein, 18 aa, Homo sapiens
LGSQIFLPLAFGSTLFSC

SEQ ID NO: 5801 - protein, 26 aa, Homo sapiens
MRSQMEKKLKVFSFFTLHGGAWLLRL

SEQ ID NO: 5802 - protein, 31 aa, Homo sapiens
MQSSHSSILWSASLGCVATHLSFMSSSAMPR

SEQ ID NO: 5803 - protein, 24 aa, Homo sapiens
ITSNSSQTFLVATLGILRFSLACP

SEQ ID NO: 5804 - protein, 19 aa, Homo sapiens
LSVVYSINMFLAGLSGSCL

SEQ ID NO: 5805 - protein, 34 aa, Homo sapiens
MCPAARASAAARAAAAARAAGMPGRRAPGLGPRR

SEQ ID NO: 5806 - protein, 89 aa, Homo sapiens
LLPGDPLSSHLLLLPLLLHRARARTPPGCRSRTAPARTTRRCRCCGTRRSRWPCPWCTRWWRRSASRATSSLCGCCAGAWGPDPRRSSS

SEQ ID NO: 5807 - protein, 55 aa, Homo sapiens
LVLAKFVILRNSAVLSSTASFCLPCSFPDVIQVAEFRCPCFGSLSLCLSFFPCSR

SEQ ID NO: 5808 - protein, 7 aa, Homo sapiens
VWFLLGF

SEQ ID NO: 5809 - protein, 52 aa, Homo sapiens
LVRQILFFFFPRALAPCPLVAFVGARHAAGRPRTRSSPAGKYASDSSLFSNV

SEQ ID NO: 5810 - protein, 94 aa, Homo sapiens
IAAAVFPFFFCRRLLCLFSSFLALLLCSVTSPNPLPTQPAPFFFCLRCSISPSAAAATAAHSWCRCRAFTPKSFPQPMAQAALGISAQGNHIPL

SEQ ID NO: 5811 - protein, 86 aa, Homo sapiens
VPASQWPGLLRLVTPLSLTPALGARAPPPQRPAVRGPTAARAPAPRTVPGRLAPWRPPAAPGDPCCCYCCCCCSASCIVRQQQCLW

SEQ ID NO: 5812 - protein, 18 aa, Homo sapiens
VRPPWLWRSLLSGSFCLS

SEQ ID NO: 5813 - protein, 13 aa, Homo sapiens
MYVSPGLFFFFFF

SEQ ID NO: 5814 - protein, 35 aa, Homo sapiens
LTIFFLPLATSLPTCFLSTLVQLFLQRPRSSELHI

SEQ ID NO: 5815 - protein, 54 aa, Homo sapiens
KKRSPRWSLTMAPACAKLVLLGTTLPEPCFLPSSGAPDTRTPTWATRPRASVAS

SEQ ID NO: 5816 - protein, 85 aa, Homo sapiens
LRSPWLLFLLPQVGTGDASSFSQDRTMSLAAAPVREAPPPPTGASSEPSVPALPGADPQRSAELLLLAVTREGLERRIISRKRAE

SEQ ID NO: 5817 - protein, 54 aa, Homo sapiens
LHTLLPLRLKFRILVTSALIFHLQHPQPWHPGWEGLHLSLPSFPVFKTFLEGDT

SEQ ID NO: 5818 - protein, 70 aa, Homo sapiens
LVAAVVALCAGAELTGRSGRLWPRQLKPGLLMLPRLVLELLGSSDPPASAFGVVTGLKISFFAEGTHLLV

SEQ ID NO: 5819 - protein, 20 aa, Homo sapiens
VRGLLIRILVLSVSVCEWIP

SEQ ID NO: 5820 - protein, 36 aa, Homo sapiens
VHELPMWCLVIAVSVALPCFPGWVFASHHGGRARGD

SEQ ID NO: 5821 - protein, 44 aa, Homo sapiens
VHELPMWCLVIAVSVALPCFPGWVFASHHGAQGQSGHEREEADI

SEQ ID NO: 5822 - protein, 83 aa, Homo sapiens
VHELPMWCLVIAVSVALPCFPGWVFASHHGGFCTTGTWLSCGWSSIAHQAGGENEEDRGLLTASHHSSAAQGQSGHEREEADI

SEQ ID NO: 5823 - protein, 70 aa, Homo sapiens
VTGCVCEVWGAGGQQQGRWVVGSSQPPAADPALPDMVRVSLRSFHPPVFPGGCLLSLPVPTSSSWLWPRF

SEQ ID NO: 5824 - protein, 143 aa, Homo sapiens
MGPPGPRSKFTSTPPPIPPSAPLASAAWCHHRAAMGWPGPSPGALRGQPLWSTRVTVGGTPVTRLPTAQPLGTLSTAAARRMPASCASVARRAAGHLKLTTLCLGARPGTELAGAQGARRPTIISRTGIQGAWAAPRPPGSPW

SEQ ID NO: 5825 - protein, 50 aa, Homo sapiens
LLSGGRPTARSFFSALVRFLFGFLPASGATRVARQQPLGDLVLGSCPAWG

SEQ ID NO: 5826 - protein, 80 aa, Homo sapiens
MSSPPLSPGPLLLTRATSESWGQREVGSMPPGVGELGARVPLEFPVVAHGGAAPGPASAASLRRCAEAWCARSEPPYWVQ

SEQ ID NO: 5827 - protein, 89 aa, Homo sapiens
LLLLSCLLAVPAVPAVPALSPLLPRLLDAGDASELVIGALRRLGLIPKISHYVHANQRSIVMTPGGHPVTPITALSTSTQRQSFLASLL

SEQ ID NO: 5828 - protein, 56 aa, Homo sapiens
LLLLSCLLAVPAVPAVPALSPLLPRLLDAGDASELVIGALRRAQAPSSARGAQAAP

SEQ ID NO: 5829 - protein, 59 aa, Homo sapiens
LRAVGPFMGLTWWIHIKPVSVGTSVLAAGGEGKPDPAPPGGPSGVWLGVKGALWQYGVG

SEQ ID NO: 5830 - protein, 48 aa, Homo sapiens
MRCARSRGRVAAAAVGAPGPGDAAVARAPPRPHRPHGAPGGRRHRRDR

SEQ ID NO: 5831 - protein, 39 aa, Homo sapiens
LFLEGIYVLVCCCVVSPKSQSDEATKRPPELQESSSSLG

SEQ ID NO: 5832 - protein, 36 aa, Homo sapiens
LGGGQASGSREPDPHLSSKQAQRVSCTGAWAGGRCF

SEQ ID NO: 5833 - protein, 95 aa, Homo sapiens
MILIRKLFLRRCHWGGWLLPPARASCSGKHSLSHSCRGPRVQRPPHPRFWAGTLAPGPCPGLWCLPGLVQVDVLAAGRCDHLSCLPPLCPQAFLL

SEQ ID NO: 5834 - protein, 19 aa, Homo sapiens
VAGSLCVLQIVTLMVAPEL

SEQ ID NO: 5835 - protein, 48 aa, Homo sapiens
VAAAAVALVAAVAEVEVEVEAEAEAEPEAARRGARRRGTRPRSVGILN

SEQ ID NO: 5836 - protein, 61 aa, Homo sapiens
VVVTQSLCMLSVIQTGNLVLCSRGPRLLSHIKSPRPLWTLNCTCLSHFLQIMINAISVSKL

SEQ ID NO: 5837 - protein, 115 aa, Homo sapiens
MGRKSGSRTGSLCALWGPTNPPRLQAFLPHAGSPARTMSPLCWLRRGTWRWGKALLLDISTPPHHWQGNWWRGRGGGGRHSRQQLEFYNGSSSQQDREGAWEGDAREARPCLPSF

SEQ ID NO: 5838 - protein, 94 aa, Homo sapiens
LALTALQLCSLPAQSLCRLGGCSWGSGHRAPGPGYCLLRTLASGLENRSPGWGRAWGQSHLQRRQQSGAGCRDGLARWQLQVPGRQALDAPKRW

SEQ ID NO: 5839 - protein, 54 aa, Homo sapiens
LAYFVTGHLISTCVGLILLLEMSLYPALHTYLGGVKRAQEGPTDTAWLRGLGRR

SEQ ID NO: 5840 - protein, 13 aa, Homo sapiens
VLWIYHSLLSLII

SEQ ID NO: 5841 - protein, 31 aa, Homo sapiens
LGLERLVTWLARGGARGVGSAGLGLVAPAAA

SEQ ID NO: 5842 - protein, 38 aa, Homo sapiens
MAKPWPICVCVTPLPSRLGLAAGIPLMRWVPGTLEPLV

SEQ ID NO: 5843 - protein, 30 aa, Homo sapiens
MGGKSWLFFYSLVFCALLPLPRREDPFKLF

SEQ ID NO: 5844 - protein, 15 aa, Homo sapiens
RDKILSYFQKLLLVL

SEQ ID NO: 5845 - protein, 14 aa, Homo sapiens
LVPWVICLLLCPCK

SEQ ID NO: 5846 - protein, 49 aa, Homo sapiens
MSRLSLSWESLTNAIWPLDLQDIKGYLPNPLPQRVNLRKQILSISKEPN

SEQ ID NO: 5847 - protein, 86 aa, Homo sapiens
VILPHLFPQLTPLCLSLTLLSPQPKPGHTLAAGGLGFDHRWVLFHFWFKNLLTWVMSCTQVLLVGKKQLLLHLHPSPMELAFSRPP

SEQ ID NO: 5848 - protein, 48 aa, Homo sapiens
MARPLSLAAAGAPDLLFTALCSLLIEAQPLRPFDLQVLGDPQPRARTP

SEQ ID NO: 5849 - protein, 32 aa, Homo sapiens
LPCCCTQKRNMYRIVNLILDLPALVIVTHASV

SEQ ID NO: 5850 - protein, 46 aa, Homo sapiens
MVLLLAQVVWATLDMGVHRASFTALIMSGSPPAGVCPADPDSTTDE

SEQ ID NO: 5851 - protein, 28 aa, Homo sapiens
MSVRPDAWPLAAWEVAGAAFAFARDSSN

SEQ ID NO: 5852 - protein, 28 aa, Homo sapiens
MAPARATSSAPAAAASSAAATAPPAGCG

SEQ ID NO: 5853 - protein, 38 aa, Homo sapiens
MLSLRAPLGRREASSGSGLRSVGASARLSPALAGLSGP

SEQ ID NO: 5854 - protein, 39 aa, Homo sapiens
MFSTWSRTEKLLCLCSLGTHWKLYSDIFWDLVWIVQTGA

SEQ ID NO: 5855 - protein, 45 aa, Homo sapiens
MEAAAAAAAGSRCAPSTAAREVGKFAARRPKARGAAPLCRELSPI

SEQ ID NO: 5856 - protein, 55 aa, Homo sapiens
GVFVVARDRRRRELRTGAFSLLLGVVALLPLCGKRIQALPRACGCGGPEVLVVPR

SEQ ID NO: 5857 - protein, 68 aa, Homo sapiens
PGGPEVESARLFCACAARVTLLAAPRLPARRHLVLGFHCSRWAGRFSVIAAGGGGGVTSGQPRNPTIL

SEQ ID NO: 5858 - protein, 48 aa, Homo sapiens
MPVCCMQAFWLPTLQQNNCTNSLVPIPPTESPGATVFFALHCRRGTKC

SEQ ID NO: 5859 - protein, 66 aa, Homo sapiens
MEITSPDLAFLSLFLFSPLPSDDWRVKGNPERGGEQRFEKMQECVWRRVKLPFKLWPPGTRCSAAG

SEQ ID NO: 5860 - protein, 52 aa, Homo sapiens
MRFLISIICTWRFIQERITGADLNHGAHKWGGCSSGHGKNFLLQLETAFCVG

SEQ ID NO: 5861 - protein, 38 aa, Homo sapiens
MDEKMLVLWVVALSGISTLFFAADHLVVCECTYRFGRE

SEQ ID NO: 5862 - protein, 42 aa, Homo sapiens
MESRTLLLLFSGAVALIQTWADYNYNQGRNDLIFTLQLWKRQ

SEQ ID NO: 5863 - protein, 71 aa, Homo sapiens
MSGALTLYISPNLCVLCLIFCLGWSRSQEEADPCWLWENAEFIAWHKCKGPSPPCEFWSLMITYMCLVLSV

SEQ ID NO: 5864 - protein, 99 aa, Homo sapiens
YWSLVFFHLFSLISFACTLPGCWRLEAVTQQQREATLERPHIATSPSAARPPRAQEARNLWHPSLKGEDGNPAEALLGWGLHDRAGLIKWRPTRGSNPG

SEQ ID NO: 5865 - protein, 103 aa, Homo sapiens
MYCLIPEHGRKAGSLLGMLFSGGQAKLWGTASESLCSQSAADTCRQSPLLQDVPLHGELPEAEKGATDLKAAQRRVLPKAQGDRCLVSAGVYSKPKGSPVSKW

SEQ ID NO: 5866 - protein, 21 aa, Homo sapiens
IWNFPVKRPPTTLLLSLCTCV

SEQ ID NO: 5867 - protein, 53 aa, Homo sapiens
MLLLVAAASGAGGAAAKMEEPSRRCCRRCRRRCCRRRPRSRSSSRSGDAVLSA

SEQ ID NO: 5868 - protein, 29 aa, Homo sapiens
MSRAAAATAAAATWGRAAAAAAAAGTRGQ

SEQ ID NO: 5869 - protein, 31 aa, Homo sapiens
MKGHNLGLTLAAQMATCAFSAASPGEKAMRA

SEQ ID NO: 5870 - protein, 37 aa, Homo sapiens
MCARFRKAAHSRFLGVSAAVGSWGQGPGCWGVGRGSR

SEQ ID NO: 5871 - protein, 40 aa, Homo sapiens
MGHGMRRRPQQAPAAPAPAPGPAAAAAAPALPPPGEALQP

SEQ ID NO: 5872 - protein, 47 aa, Homo sapiens
FGKLGCGVIPVCLLPAFLGFFRRRGASLRNSRPLRATALAVSFASSS

SEQ ID NO: 5873 - protein, 54 aa, Homo sapiens
MYCLIPEHGRKAGSLLGMLFSGGQAKLWGTASESLCSQSAADTCRQSPLLQIIL

SEQ ID NO: 5874 - protein, 63 aa, Homo sapiens
MLGIGCAATQRSPGAAAASAWAAYAASAAPRRGGRRRRRGRLGAAMAGGGARPGAAGLKLLAP

SEQ ID NO: 5875 - protein, 68 aa, Homo sapiens
MSPGRNVPPQIMLFISLGGSAARQHQAPGGRCARSPALPSSPCAAAAATPGLGVAPASVPGQGSFHED

SEQ ID NO: 5876 - protein, 92 aa, Homo sapiens
MAGLFVFAVCFSCWVLPQGQYGRRCHMYIMAFVTWTSWRACRIVKDGGFCRLVPRRAGEKVGWTVLDCCITQPIRNGGGIDHSQLEQKMELD

SEQ ID NO: 5877 - protein, 9 aa, Homo sapiens
MKLAAFLLL

SEQ ID NO: 5878 - protein, 34 aa, Homo sapiens
MRPAAVAPASAGAAAAEAAAEAAATAAPPPADLD

SEQ ID NO: 5879 - protein, 35 aa, Homo sapiens
GALQSSSLQVLLLNSVLGTSGPGKEPKRSQPASRR

SEQ ID NO: 5880 - protein, 74 aa, Homo sapiens
MRRAPASPPPARAAAPAFPAVVPHSVPAPRGRRLLPLGAVAACAVSAAQPLSPSLRQPRRTAHQEARARMGSLC

SEQ ID NO: 5881 - protein, 22 aa, Homo sapiens
RISAGLAVTLSPSGLTGSEGHA

SEQ ID NO: 5882 - protein, 23 aa, Homo sapiens
MMFSILMEVLICIPAPGNVFIHG

SEQ ID NO: 5883 - protein, 25 aa, Homo sapiens
MSLALSRGLLLLLPHQSGWCCGRRA

SEQ ID NO: 5884 - protein, 26 aa, Homo sapiens
MILRPPQPCATACLLLWAQCLPRSME

SEQ ID NO: 5885 - protein, 26 aa, Homo sapiens
KSPAGQGAPLAAAALALSQCAALQPA

SEQ ID NO: 5886 - protein, 74 aa, Homo sapiens [sequence omitted]

SEQ ID NO: 5887 - protein, 28 aa, Homo sapiens
MLHGPWFVTIVFLMASRWNRETWSPWPV

SEQ ID NO: 5888 - protein, 29 aa, Homo sapiens
MLLAAPASSPSSRAACWGFVVARTPRATP

SEQ ID NO: 5889 - protein, 29 aa, Homo sapiens
PVVGLLAALTLNLSVRGEGICRCGFWSCS

SEQ ID NO: 5890 - protein, 29 aa, Homo sapiens
KLISARLFATFASCFRCVCCVLLRAPQSP

SEQ ID NO: 5891 - protein, 30 aa, Homo sapiens
RRRRGSHRLAPALWTLSRSGAETAAARELF

SEQ ID NO: 5892 - protein, 30 aa, Homo sapiens
MAGSDSLLSGVFLVFLDLEVVPCGYLHGRR

SEQ ID NO: 5893 - protein, 32 aa, Homo sapiens
MFSSPAPAALQAAAAATKTTTATATPKHSFRG

SEQ ID NO: 5894 - protein, 33 aa, Homo sapiens
GVRLKTCWRGVTSLLLSLSSSSAPRFRGCPSAL

SEQ ID NO: 5895 - protein, 35 aa, Homo sapiens
MMRPCLGRCSRRRRRRRPGGAAAPGDPARASDPIT

SEQ ID NO: 5896 - protein, 35 aa, Homo sapiens
MGNSRGAAAWGLKGAASATAMAAGSSRRLQLLLAQ

SEQ ID NO: 5897 - protein, 35 aa, Homo sapiens
AGESWRGRWPRGARLVAGPALQPLAARVCSLLVLG

SEQ ID NO: 5898 - protein, 35 aa, Homo sapiens
RGSPVSRRRLKSELLGFAQIGVGRACLWGAATPYC

SEQ ID NO: 5899 - protein, 36 aa, Homo sapiens
PAFARFRSSSSPLLPLLLLLRLLAEAGGSSGGGGGG

SEQ ID NO: 5900 - protein, 36 aa, Homo sapiens
EEKHIFSFACIIRVSTPLLSFLATLLQSSTNYPCPG

SEQ ID NO: 5901 - protein, 38 aa, Homo sapiens
VAPQVQLVSVLFLFQAPSNGGLQASGPLTILEVKISSG

SEQ ID NO: 5902 - protein, 40 aa, Homo sapiens
MQSAQRSGERGTPRTGPGSSSFAAAATTAATAARGGSSRA

SEQ ID NO: 5903 - protein, 42 aa, Homo sapiens
RRAVPASTVSGVVAAAVAEDYGDKDEGRSPSSLRAAPLRSAG

SEQ ID NO: 5904 - protein, 43 aa, Homo sapiens
MMWKGLCLSATENFILAVFVETAFGKRKEMNFTDLTFLHLPFF

SEQ ID NO: 5905 - protein, 44 aa, Homo sapiens
RFALPALGIPLFPSASAALPFSGAQLWSFHPARQRGEGARAASG

SEQ ID NO: 5906 - protein, 45 aa, Homo sapiens
MTVSLFLLLATSQSQDGCCDSGSCPNSRQQEGHGAAPASSCLPIP

SEQ ID NO: 5907 - protein, 46 aa, Homo sapiens
GEVTWAPAARLSALGFLRPPAPATASPAPRRYLSKVPLEAPGWGRL

SEQ ID NO: 5908 - protein, 46 aa, Homo sapiens [sequence omitted]

SEQ ID NO: 5909 - protein, 48 aa, Homo sapiens
MKTQSWLLHSLFFFPSPDFSKSTAQRRRQQNPILVQLLRTLHFPRRKN

SEQ ID NO: 5910 - protein, 49 aa, Homo sapiens
WVWPAALVSAVSCALHAGSALQGLLSAQRTPAARGRRGPELPPAAVFTH

SEQ ID NO: 5911 - protein, 51 aa, Homo sapiens
GKLVAAAAVVFSWCPAETAAAQGVAGPTQDLPGPSALRDKGPALAKADGQE

SEQ ID NO: 5912 - protein, 51 aa, Homo sapiens
LGTESPGRRLGGRHLFCPGLGLPEHLSFLSQIVFSFSFKASGVAATLPGSL

SEQ ID NO: 5913 - protein, 52 aa, Homo sapiens
TALGRSSRSRLYFRRRETSVASLSCGLSPSPSLAVLRHRTPPHPISRNLQTS

SEQ ID NO: 5914 - protein, 53 aa, Homo sapiens
MSLPRGRPGSLSSLWPLPSARADEVRVALGRSAWHAQRRRAGGLGCHRVREEI

SEQ ID NO: 5915 - protein, 55 aa, Homo sapiens
MGTRARPGSRCRRTAPSLALCARSHPVTLPAPRALPPELLLLLWLLSPPPRVARC

SEQ ID NO: 5916 - protein, 17 aa, Homo sapiens
MRRAWRPRLLGAALVAH

SEQ ID NO: 5917 - protein, 56 aa, Homo sapiens
SQPAPALLLGTARSGPSSTSPFPIPVVAAVLQPPAELTRVWGLAPLAPFGFSYCLH

SEQ ID NO: 5918 - protein, 57 aa, Homo sapiens
GDKHSAAVAAAALLRVLSLCRRCPAHWPPPSLVERGCQRGSLSPAPRGPQRAPQRAP

SEQ ID NO: 5919 - protein, 57 aa, Homo sapiens [sequence omitted]

SEQ ID NO: 5920 - protein, 58 aa, Homo sapiens [sequence omitted]

SEQ ID NO: 5921 - protein, 59 aa, Homo sapiens
KRAGGGCGAAGAATAAAAACWLPRLPGGDCWKLQGTAAVLCHIVSSPAGPSPPGRADEL

SEQ ID NO: 5922 - protein, 59 aa, Homo sapiens
LLLVLSLCFWFASFGPWGPGKTRHRIARTQSSSPRLLSPQQLGFRGECPARWLHRPWRS

SEQ ID NO: 5923 - protein, 60 aa, Homo sapiens [sequence omitted]

SEQ ID NO: 5924 - protein, 61 aa, Homo sapiens
MFKIQPKIVLCCCMSHTVVRSCEIATCAKRNVSVTCPRNTAEAEREDVLIYHYRYMKALFI

SEQ ID NO: 5925 - protein, 62 aa, Homo sapiens
EQPDQVPLAVLPGSLILALVYFQNQGSGPYGIAQVAAQAQYLRTGPSPFPLWDLSSGPSLLR

SEQ ID NO: 5926 - protein, 63 aa, Homo sapiens
MASYVAIRQSCCSWFFSLFSSAKSKSSRVQKQHSCLKARKSLQKQNKKTWTDTPLRNRQKKRN

SEQ ID NO: 5927 - protein, 71 aa, Homo sapiens
PPPTPLHVRVSLGSVHLARPVLGLLLLLTTTTTTGAASAVPGVSSCSGHTAPGDCSSSNQNLGLTGTLAPK

SEQ ID NO: 5928 - protein, 73 aa, Homo sapiens
RFAQGIVGRAAGAAAAAILGAPGATGFSLEAAFVAAVDAGKRHKVRWPTPFFPPASVEPPARVRRRRRGELAA

SEQ ID NO: 5929 - protein, 75 aa, Homo sapiens
TLGSANRAFCGLCGESWRRRLPVAGLGAAPVGGLLPGPAAQPSRRLGGHSQAGLRGSGSVDPSRQNSRSAAAFKT

SEQ ID NO: 5930 - protein, 58 aa, Homo sapiens
MAPAAGAASAAAGGRPEAVLAVAAAAVARRPGTESESTVASAAAAAAAAVATAAGTRS

SEQ ID NO: 5931 - protein, 79 aa, Homo sapiens
MSCGSRRGPSLASSLAWLQLQSGTRPFCSSSPPYFLSHGRRIPFSHPRKESALRATKEPRTHRTNTSLADLPSPAPAHL

SEQ ID NO: 5932 - protein, 66 aa, Homo sapiens
MLGAFSARSCPSPSPAALARRPPAPAPAAALGTPAPGAQLPATAAAWVWGLLRLSRASAPALRTDA

SEQ ID NO: 5933 - protein, 84 aa, Homo sapiens
RFFPQASGLFGALVACLPNSAASPRQEHFLPRLLKLVRGFPTSQKSFIGPPLETSDRSHRRLASGICPHPRGQVRDQRPAKPSP

SEQ ID NO: 5934 - protein, 90 aa, Homo sapiens
GVSIRPLSLGRCWGRWQLQTRGLALLTAVCSTGVPRGTCSQQVAQAVTQLRRCEWRGHRGGQGRGRRGARGSSAGDNLRAFVDNCLYAKH

SEQ ID NO: 5935 - protein, 97 aa, Homo sapiens
LGSCGRGHREALGCAWLLLVGALSRRPAWGGGGVDSSPASPWRGGLHSLLRPPPLGPQRLGPASCFPACRRSRWLEEVFTSQESQSVSGPRWEKNWL

SEQ ID NO: 5936 - protein, 35 aa, Homo sapiens
MAALPPLLGSVGSWGARSGPEPELASRAETCAPRL

SEQ ID NO: 5937 - protein, 102 aa, Homo sapiens
ARGFSALSPRRIPGVDLLAASLCLPSCAPFPASRCCWRALAGFFLPRPRDGGECGTEEPGLPTRWARAPKGPLGSERGGSPRGPRPSLASDCATLRSGLTGG

SEQ ID NO: 5938 - protein, 106 aa, Homo sapiens [sequence omitted]

SEQ ID NO: 5939 - protein, 117 aa, Homo sapiens
LGRASASALGLPAACSGSSGRGLAWPGAHPGGCSPCLTCGGVTGPGPAPVHLRGLHPPAAGCPALCAEALPCPAGRRAGLGLAAASGDGGCGLPPSSARLRWGPPPGLPAGTGIHGP

SEQ ID NO: 5940 - protein, 126 aa, Homo sapiens
PPAAAAAAAAATATATATATAVAAGFVGSAAEQEPELWPELWPESQGAGRLIPEVGAEDRRARTRGHRPLPLLRLRERALGASEAAAAGAGQRGRPLAATPPSPALPGPAPSPARAWSDRERRRRG

SEQ ID NO: 5941 - protein, 33 aa, Homo sapiens
PPLVVLGSRLAPLRGVALSSSLLAADLLSRSAD

SEQ ID NO: 5942 - protein, 52 aa, Homo sapiens
MGRWRVSSVESWPFASTGGKLAIATAGTGTQAAPRPFLIRPPDSWALALALM

SEQ ID NO: 5943 - protein, 58 aa, Homo sapiens
MAAALRRPVSSSPPSSAPPLAASSSRVSSSSFAASSSSCSSTSDRRSAGSLTRSSGGG

SEQ ID NO: 5944 - protein, 81 aa, Homo sapiens
EVRRRRGLELRRGLGRRAAAGGGGHVATAVAARAAAATAAAASARAAGRPPTLPPRGSPSSLHLAPLVPLARPGAALCFSL

SEQ ID NO: 5945 - protein, 20 aa, Homo sapiens
LLYLIHKILVCIFLNTVHVP

SEQ ID NO: 5946 - protein, 53 aa, Homo sapiens
IATVSIAAAVAPLTLFLYRGDGGLSSRRRADAAAGAFQLMWRSRCEATYKSIY

SEQ ID NO: 5947 - protein, 34 aa, Homo sapiens
LFMAVPGSPTFFPAVVLNLSKAEAVELEVLAGVK

SEQ ID NO: 5948 - protein, 12 aa, Homo sapiens
KVHVLLMLTLID

SEQ ID NO: 5949 - protein, 29 aa, Homo sapiens
LAAGFLLSFWAAMSAGPAQQLRAHGGPRC

SEQ ID NO: 5950 - protein, 29 aa, Homo sapiens
ILKAPGLTGFFVLSTGFCFTTGHKHVRQK

SEQ ID NO: 5951 - protein, 23 aa, Homo sapiens
LRLRLRLRRLRFPMGLACGAWAL

SEQ ID NO: 5952 - protein, 16 aa, Homo sapiens
MLAFILITDVILCILL

SEQ ID NO: 5953 - protein, 67 aa, Homo sapiens
LVSVSLAISLSLKISAPVSMSLSLCAPRIFRAPTPVPRGPRLGAGPPTSAETQSVERSPPSPHPQPL

SEQ ID NO: 5954 - protein, 12 aa, Homo sapiens
LLWFFLGVMKFH

SEQ ID NO: 5955 - protein, 35 aa, Homo sapiens
VSVEARTRGGAGTAAAAAAAGGTLIPVLRTPRASP

SEQ ID NO: 5956 - protein, 21 aa, Homo sapiens
VGFGLSLSVGLGMFLNLTWWS

SEQ ID NO: 5957 - protein, 56 aa, Homo sapiens
MSASRNLRTLKGRTAPGSTLPLRRRPPPHSRCLMSTFSRWLRSPCQCLPRSLHTQT

SEQ ID NO: 5958 - protein, 22 aa, Homo sapiens
LSLLITSLAYFWISFPPFSSKS

SEQ ID NO: 5959 - protein, 83 aa, Homo sapiens
MPIQHPSRHSAVSCLGVAAAMARKALPPTHLGQSWFCSCCRDTELAISALRARTATGSPGSCRCTAGPLPCASALESCCCRVT

SEQ ID NO: 5960 - protein, 138 aa, Homo sapiens
VRKHYFSKRSFLPCSLLQPLAQPLRPLPVNDAMEGVLGSPCVPCIGASQPPGPLLWGSRHPHATNRRQGRPLSPVHLLGRTRGCGTEEVQVIPGDRDRAGRRQDPLGKHGEGRSPGNGPAAHHPLRARGGLEVGSQHL

SEQ ID NO: 5961 - protein, 44 aa, Homo sapiens
VAVLLIAWVVVGVSLQRRILTVKKQSGSRGPPLIPQGPDGGQRG

SEQ ID NO: 5962 - protein, 88 aa, Homo sapiens
VSKPRIMQPPAFEFLVSLALVSTCMMGFSGPGFDQRTLCHHRFFLSLSYLGELMTPGPCSTRMSPRSCQLGSASMNASNFVEARVPCS

SEQ ID NO: 5963 - protein, 87 aa, Homo sapiens
VSKPRIMPPAFEFLVSLALVSTCMMGFSGPGFDQRTLCHHRFFLSLSYLGELMTPGPCSTRMSPRSCQLGSASMNASNFVEARVPCS

SEQ ID NO: 5964 - protein, 43 aa, Homo sapiens
LGVLPLLLLVLNLVYSLLIKCTTLDTVQDDATSSWMLICHVDF

SEQ ID NO: 5965 - protein, 32 aa, Homo sapiens
LDRRGTSTSILLLLSPASPAAPNRPVKMAAAG

SEQ ID NO: 5966 - protein, 29 aa, Homo sapiens
MNAGYLCVWYLLCPFLFKDPEQNKDTLSI

SEQ ID NO: 5967 - protein, 24 aa, Homo sapiens
VIWAFICVRSRFILFLTVFSSTSG

SEQ ID NO: 5968 - protein, 27 aa, Homo sapiens
MLFLVSLGIVLAVERKASVTSRNSPII

SEQ ID NO: 5969 - protein, 13 aa, Homo sapiens
MLPCNFSFFCLFV

SEQ ID NO: 5970 - protein, 116 aa, Homo sapiens
LGPKIKSQEKIMERKIHWNSWRASLSLESLFCYSLLLLLPFPTPSQAREICVKFTRGVDFNWQAQALLALQEAAEAFLVHLFEDAYLLTLHAGRVTLFPKDVQLARRIRGLEEGLG

SEQ ID NO: 5971 - protein, 71 aa, Homo sapiens [sequence omitted]

SEQ ID NO: 5972 - protein, 17 aa, Homo sapiens
LYLLCSLMPAWTILEAV

SEQ ID NO: 5973 - protein, 56 aa, Homo sapiens
LSSWMRFLISIICTWRFIQERITGADLNHGAHKWGGCSSGHGKNFLLQLETAFCVG

SEQ ID NO: 5974 - protein, 17 aa, Homo sapiens
LLLLLLLVAPLQMYCCP

SEQ ID NO: 5975 - protein, 51 aa, Homo sapiens
LQKTFLSHIFLLLISQQLKFQLMDSILPVKTSSPENCASWHPAVPKYYLTH

SEQ ID NO: 5976 - protein, 8 aa, Homo sapiens
LLIVLLFA

SEQ ID NO: 5977 - protein, 119 aa, Homo sapiens
VVSKRSCRLLRCRCWFSHLLGLFSSSVPTLSFSLQPLKILVSPWAAAPPVVTGIVRTSRTQSLASAEVSLMPRFAFLTWGGKRQKWMSFRFVATWCQMNMSSCPLKPWRLPEFVPISTW

SEQ ID NO: 5978 - protein, 73 aa, Homo sapiens
MSRTPEFGTSSPTTLRRLSCRAALCTLSWISQTPIPSQLSPAVRCCHRARTSKMCSPGTSTAASSATWSMSSS

SEQ ID NO: 5979 - protein, 24 aa, Homo sapiens
LLLLSFLISDWPPPTGSAEHKYSG

SEQ ID NO: 5980 - protein, 8 aa, Homo sapiens
KLAAFLLL

SEQ ID NO: 5981 - protein, 35 aa, Homo sapiens
TCSGIFSTRGRHRRRLASSGLICATCPLHTPPPSW

SEQ ID NO: 5982 - protein, 10 aa, Homo sapiens
LSRLNMLWLL

SEQ ID NO: 5983 - protein, 76 aa, Homo sapiens
LCKQSLVYSCLHQSTVRFMKKNKLRTTLYVHLQMPQLMLVGCLSAFCDNEHMDFCLLNSVDPFSQLPGAWIFTSNC

SEQ ID NO: 5984 - protein, 56 aa, Homo sapiens
MKHLNEGLITLNSAFVKYAFLLSSFILQYVCRSVDSDLNQIYFTLSLICRYVQTTS

SEQ ID NO: 5985 - protein, 93 aa, Homo sapiens
TAAAAGPMAPTTRRAVSFGLMAPAPSGVAAGLGVARWSAHLPAVGWVKCVASCHPASTAASPSAQLSARRGVTPITSLWMGTDSISKAPASTC

SEQ ID NO: 5986 - protein, 93 aa, Homo sapiens; identical to SEQ ID NO: 5985

SEQ ID NO: 5987 - protein, 22 aa, Homo sapiens
VLAGSWSSVFTPIQLLTLAFVP

SEQ ID NO: 5988 - protein, 148 aa, Homo sapiens
MSTCPQRICPRAGTGAMWMVSTMPASPGTSTSPNTAAPAGPTPAPALWRIGSTSRGRERGPPPSCPCRTSSTAVTLAPVKGVMTCPCGTTPTSTASLTRPATTTRPRTRSVTSLTNVGHAMNSKSATPSGTTPSGGWETTAPSLGGRR

SEQ ID NO: 5989 - protein, 11 aa, Homo sapiens
LSYFQKLLLVL

SEQ ID NO: 5990 - protein, 31 aa, Homo sapiens
MARGPTSLSAAIWGTVLEAGIQGQIRHRSCS

SEQ ID NO: 5991 - protein, 93 aa, Homo sapiens
MRPWYQAWLRRSSLLRSSSSSSSFFSFSGVLSMMCLSLENCNTESTMSSPCPGHTRPCQLEVTACFTNPTSYATACIQGDVATGLSSDQGAEM

SEQ ID NO: 5992 - protein, 89 aa, Homo sapiens
MHLLTSCKSGTFSAPLLLCCRREKLGMCSSGVPSPPASHCPCLPKTSSLSLLCPPPPPSAFALLSSFSPEVRAASSPLVLFLPSLCSLL

SEQ ID NO: 5993 - protein, 61 aa, Homo sapiens
IFILVFLLLFSSFVFFFSLETGSSYVGQAGLESPGSSDPPASASGKVGLQARIAAPGQSLF

SEQ ID NO: 5994 - protein, 57 aa, Homo sapiens
MFIYKDLACSCVCGAALVSQLSITLARVSPCGFLLLRLPGWSRPHRRARGPARSCVQ

SEQ ID NO: 5995 - protein, 34 aa, Homo sapiens
TGLELQGERRRCVLLRVGRALVGAGSGAGLSALA

SEQ ID NO: 5996 - protein, 59 aa, Homo sapiens
MQLWWRPLSFLCQCLVILQRDAALHRDAHAVSHTSLHHLDCPALCILKPTACRSRHFSI

SEQ ID NO: 5997 - protein, 19 aa, Homo sapiens
LVMLLLLLLPPPPPLLLIL

SEQ ID NO: 5998 - protein, 64 aa, Homo sapiens
IHYSRLDRLLWLSLLAWCICYGKRDYNLVLFVEMTTLIKSTHCWSQHTWKVLQGLSYRKPRDRK

SEQ ID NO: 5999 - protein, 16 aa, Homo sapiens
IPLVQFSMFLCVLHLL

SEQ ID NO: 6000 - protein, 15 aa, Homo sapiens
RLAKSSLLWMFFMML

SEQ ID NO: 6001 - protein, 11 aa, Homo sapiens
IFFFSLSVWLC

SEQ ID NO: 6002 - protein, 28 aa, Homo sapiens
TIFALFVTFYSNHLFFCGNWHCPNFYPL

SEQ ID NO: 6003 - protein, 58 aa, Homo sapiens
VCMWVQPWEHCGSASQEPWRSRSLKTQWWHWWAPMPPCAAPSPLSLASAWHSSTSSGS

SEQ ID NO: 6004 - protein, 31 aa, Homo sapiens
VGRFWALWLGFCNFSLGTAVEPHPLWIIIAT

SEQ ID NO: 6005 - protein, 12 aa, Homo sapiens
MGIPPVLLLLFS

SEQ ID NO: 6006 - protein, 81 aa, Homo sapiens
LREQARPGSLAAAWLQHARPPGAAAAAAPLAARRALLLFSLVLAAVLRLCGARHSEHLPLHDASPRHSDPGQRENNRCSGL

SEQ ID NO: 6007 - protein, 73 aa, Homo sapiens [sequence omitted]

SEQ ID NO: 6008 - protein, 41 aa, Homo sapiens
MSAVAKISSTSTTCSGLPPSSTLLACSWASSLPLSLEALRT

SEQ ID NO: 6009 - protein, 41 aa, Homo sapiens
MCHQYLLYILQALLSYFTSFTCLTWLDANTLDEFERTMLPF

SEQ ID NO: 6010 - protein, 29 aa, Homo sapiens
ILNAISSLLALGHFLLDPALLSAIVKDQP

SEQ ID NO: 6011 - protein, 43 aa, Homo sapiens
LRALPAGLCAASGAAAALGAPLGAGGDREARVKGATGTLARYG

SEQ ID NO: 6012 - protein, 91 aa, Homo sapiens
TGGALLLVPLSQSSPSPEVTAHPEWKSRRPTTQPPGRPWWHRTTSTTSRGPRTGCLRCRRSNKPAWRIFQEEDISITLNLLLKKLYKNKLR

SEQ ID NO: 6013 - protein, 60 aa, Homo sapiens
VACSRLTTTSVLWAQAVLASQPPKELGPQHQQQQLVIGGDRIFSCTSPHQCTANGLYPVL

SEQ ID NO: 6014 - protein, 30 aa, Homo sapiens
LLGVLPVSLLTVFGVASRIQRRPIVTPRSS

SEQ ID NO: 6015 - protein, 25 aa, Homo sapiens
LGSLSGGWVLLVPAVPASKNHWVCR

SEQ ID NO: 6016 - protein, 37 aa, Homo sapiens
LSGAQRFGRLIDHGARVLLVAAAAAAGARLCDHARTL

SEQ ID NO: 6017 - protein, 77 aa, Homo sapiens
LFETVMTFLLISLLVSFSGRAGCLEFSVKETQDSPLFLCLWESPWHTPKRGPCSVSQGSFCIFGLASYICHVVSSSA

SEQ ID NO: 6018 - protein, 72 aa, Homo sapiens
LFCFSFWLFILVATIRKSNTNSNCFLLFTFASLLVELWQVLISNTEHDLPPANVEPGIAASPDSSFIHSDSP

SEQ ID NO: 6019 - protein, 38 aa, Homo sapiens
LGPGLLLSLPSIGAQHPLPAHPSDSNSSPAPRPCVHFS

SEQ ID NO: 6020 - protein, 26 aa, Homo sapiens
MSLVICLLLKVTSRASSWHCFWNTVT

SEQ ID NO: 6021 - protein, 50 aa, Homo sapiens
TPLEPRLPGVVPAAAAAQAASALLCAGPLTPPGPSPSAGRDPGGDHESDR

SEQ ID NO: 6022 - protein, 39 aa, Homo sapiens
MRLTACGSWSCVRSVRSLSPRKPWRSTASLSTSRLMDLA

SEQ ID NO: 6023 - protein, 21 aa, Homo sapiens
VNVKCKILVMCFLFLFSCELN

SEQ ID NO: 6024 - protein, 36 aa, Homo sapiens
LPPSPTLGAYLLLWACPASLCTQCLARATGQCWGCH

SEQ ID NO: 6025 - protein, 39 aa, Homo sapiens
MTSGRKMCCAMSPSLWRDSGSALTGPCWRHAAVTSTQES

SEQ ID NO: 6026 - protein, 80 aa, Homo sapiens
MILGFPASRTAFSIFCSLPPVRSLKMKANTTQRLRCQYVLQAALLLGPSYSPASAFQEAETTRTQDCTWLANTIANKKIL

SEQ ID NO: 6027 - protein, 21 aa, Homo sapiens
LLPCIHLFSFLELGLALLPLT

SEQ ID NO: 6028 - protein, 84 aa, Homo sapiens
LDTAGASCLPALALAFPKCTASSAASAASACSPRSWMKWRRDIRSPWLSSTRSCRASERQPSLLLGRLSLSRASSPTQALSSFH

SEQ ID NO: 6029 - protein, 23 aa, Homo sapiens
MGAASQMPLTASSVPTSSTALPI

SEQ ID NO: 6030 - protein, 19 aa, Homo sapiens
IMTFGFVLSSSLLLSQGRS

SEQ ID NO: 6031 - protein, 26 aa, Homo sapiens
MFIILSYSVITLPWHYNVSSTEVLCS

SEQ ID NO: 6032 - protein, 15 aa, Homo sapiens
MLLPGLISIFRFFFF

SEQ ID NO: 6033 - protein, 38 aa, Homo sapiens
VVSSSALFLLYFIHNSQRCWTRMGRPPVAMSPPRCSWG

SEQ ID NO: 6034 - protein, 28 aa, Homo sapiens
LISYYCWGCHLLLQTLSADLSPGPSAEA

SEQ ID NO: 6035 - protein, 32 aa, Homo sapiens
LLHVAFLLLGFCFCSELSCYLFRADVTCRWRV

SEQ ID NO: 6036 - protein, 55 aa, Homo sapiens
LKLSFSTLLILCFCWSAYHLMASKTNAKFLSDYAVLRDYLKLHSKARYTTNFEME

SEQ ID NO: 6037 - protein, 77 aa, Homo sapiens [sequence omitted]

SEQ ID NO: 6038 - protein, 24 aa, Homo sapiens
MLVSCLCAALQMWRAGAWELWGRR

SEQ ID NO: 6039 - protein, 42 aa, Homo sapiens
LFGQKSKPHLATLAWLQLGTQYLGLQAILSQGPLEILFLMVL

SEQ ID NO: 6040 - protein, 63 aa, Homo sapiens
LCLPRGRLHKPSCAGLGLPACLPAWPGPSSSLPLPLATASHPGLASLLPALGPRLCPPSPQGR

SEQ ID NO: 6041 - protein, 54 aa, Homo sapiens
MGLSLPALPLGPPLPPAGLSLPQALGIIISPQKRHKNRFWIKEVFLSEMKTVFL

SEQ ID NO: 6042 - protein, 26 aa, Homo sapiens
LDVWPVSLGKLLLIIFTVDNIGENSP

SEQ ID NO: 6043 - protein, 86 aa, Homo sapiens
MCWRKKMTFLTFPGHILLEALHLLELNDCCFPLTLLFIHQTGDAYRLSVKSQSCLGRELLAISVFPFKPDPGDSEILRALLTGSGI

SEQ ID NO: 6044 - protein, 89 aa, Homo sapiens
MSLWVVTVSFLSWWCVPSGATLHFLSQAARTAQPCQCCDHGPVFGFHLLVLHKLLLSLWPRPLPRCGWFWPGRHKVAVGQDTSPVLALQ

SEQ ID NO: 6045 - protein, 97 aa, Homo sapiens
LRSSHPHIRLFSHASPQGPSVSIACLLLGSSWVQYTRTHTPVSSALCMPFRRPSWKVANRMSILGGSELTGSGQAPGKPGVWEQHPPWVPQSFQQAK

SEQ ID NO: 6046 - protein, 120 aa, Homo sapiens
MQILCNTTACFSFASFQTCHSSTYSLQATYALVAKATQSPSNTNSEEEPLPTPEVATVPSPCPCCWMWWAGSHPHAPLSGPARRLGDPEPVVAAPAAVRRGLLVPQSGRLFPSPCFPQLA

SEQ ID NO: 6047 - protein, 28 aa, Homo sapiens
MPNTASLFLLLALYLAFTLNSHGMPTRC

SEQ ID NO: 6048 - protein, 47 aa, Homo sapiens
MAGMRRAEALLSFTAPGFPRVPAHPDARWQMQPHLKDTACWINPSPP

SEQ ID NO: 6049 - protein, 86 aa, Homo sapiens [sequence omitted]

SEQ ID NO: 6050 - protein, 36 aa, Homo sapiens
MRCACWKACLLLIENRTGNIPSILCPLVSCCGFGWS

SEQ ID NO: 6051 - protein, 121 aa, Homo sapiens
LLSDRKLGVWPSACLSLSVADSHAAVSVCLRPVHPCCGRLVPSLPSLSSVCCSVGHLPGGPAARHQSDRSYDSLIGDSGWVWILTPGLCLLSQTLICHPHAEPSCHPQKPIRLPPAHGMDF

SEQ ID NO: 6052 - protein, 95 aa, Homo sapiens
MVIPSLKSPFLQYTCMCALSLSLSLTHTHTHTHTRARARALLRTEAGGEGFALVSGTGLAGASPLHVSRFSLSVSPLPSQGLSPFHPPRGTSESE

SEQ ID NO: 6053 - protein, 30 aa, Homo sapiens
VLMGFYLGASWLHWSGTGRSWRARDGTGAN

SEQ ID NO: 6054 - protein, 94 aa, Homo sapiens [sequence omitted]

SEQ ID NO: 6055 - protein, 41 aa, Homo sapiens
LNQLKTRKRRRKRKKRKMLGNIYLTCSTARTLASCCYSCKY

SEQ ID NO: 6056 - protein, 29 aa, Homo sapiens
TPRTGPGSSSFAAAATTAATAARGGSSRA

SEQ ID NO: 6057 - protein, 24 aa, Homo sapiens
IGRAVTVVCPGAAGAAAAAGHGAR

SEQ ID NO: 6058 - protein, 52 aa, Homo sapiens
LHWHLWISVLMFVLSDLTFYFLSFLEIADCSAPSTDIYINSYSFPLPSLNSF

SEQ ID NO: 6059 - protein, 40 aa, Homo sapiens
LRLQCLMGLPVGGSVFAVPGRSGEPWEEVLRRPSLGSPQD

SEQ ID NO: 6060 - protein, 25 aa, Homo sapiens
MKKTSLIVQFIQIITSMGHFRPLDN

SEQ ID NO: 6061 - protein, 13 aa, Homo sapiens
LDLIIMCNMFIIL

SEQ ID NO: 6062 - protein, 40 aa, Homo sapiens
KIIRSDVKLASQALITTWPTPWPAPLASAARAALRPLRRS

SEQ ID NO: 6063 - protein, 92 aa, Homo sapiens
TPLPASAAPQRSAPWSTSPRWARLAGAEGSGGTAGCLLALPAHNTSPSRLGSRGPLWDPGHQQLSGNNAKGVPRLLTSEQRFEKDSQAHVFS

SEQ ID NO: 6064 - protein, 44 aa, Homo sapiens
LYPESPVLNVDSIPRAGRKGTERFLSTAIAWTFLLSTPMPNCLP

SEQ ID NO: 6065 - protein, 33 aa, Homo sapiens
MYSGSRPKRNPCLLLELFMTSCSSSWSSSLFLT

SEQ ID NO: 6066 - protein, 37 aa, Homo sapiens
ILSVSLPCLLSFPFPLPVQLDPASGVPGAQHSAGQAD

SEQ ID NO: 6067 - protein, 75 aa, Homo sapiens
MWLPCIFFNFISSLAMYIHPSLSHALCRAFWFQNVPCAFLLWSSLNRMPFLPCLPVDRKILCIGELALTTIFLAC

SEQ ID NO: 6068 - protein, 19 aa, Homo sapiens
RNLLISFVTFGLLLLPHTH

SEQ ID NO: 6069 - protein, 27 aa, Homo sapiens
KIVYLPLLLLSYNAWKQEMGSAAANRT

SEQ ID NO: 6070 - protein, 63 aa, Homo sapiens
MPASTASAAPLLWPLCVPAVSRRGPWQVLSRGRGHGSTGSFSLWAGARPARGLYWGTCLRVLG

SEQ ID NO: 6071 - protein, 35 aa, Homo sapiens
IFKCNLLTYLLFMYLFKHQIFVQEFGKIEDESLIE

SEQ ID NO: 6072 - protein, 20 aa, Homo sapiens
LLHLCYLGTSVILAASTCLS

SEQ ID NO: 6073 - protein, 31 aa, Homo sapiens
LQTMGTLGSLGVTMLHLLFICLGKSCSSHTL

SEQ ID NO: 6074 - protein, 15 aa, Homo sapiens
LLKAMIVFVLLPPTS

SEQ ID NO: 6075 - protein, 26 aa, Homo sapiens
LREGFVLSSVLWCRASSSPAQPRRLN

SEQ ID NO: 6076 - protein, 57 aa, Homo sapiens
IPRRRFSGLGFLPYSLLLPLSGFYRPFAKQLSTQWSFMSSCRKYSSTDVADFAPWQN

SEQ ID NO: 6077 - protein, 39 aa, Homo sapiens
LHLSRRLCRHSLPLFRVCVATTAGGIRGVAYRAGPAPQP

SEQ ID NO: 6078 - protein, 23 aa, Homo sapiens
MGFWVGVLVFLCSFKLSPTNRKL

SEQ ID NO: 6079 - protein, 49 aa, Homo sapiens
MLTVLSPPAFGLGFSSLFTCRLSHSLPFPQHHSPRKSQCFPPIILSADP

SEQ ID NO: 6080 - protein, 30 aa, Homo sapiens
IAIKGALTVHSAISLFLCPQIPTTAPRGWA

SEQ ID NO: 6081 - protein, 22 aa, Homo sapiens
TPTFLFALLSLSHILETVFNTH

SEQ ID NO: 6082 - protein, 18 aa, Homo sapiens
IMKFVDTVMILILAMVSQ

SEQ ID NO: 6083 - protein, 32 aa, Homo sapiens
VAGKGLFFHFVRKSTEFLLYLLQLCLQPLTAG

SEQ ID NO: 6084 - protein, 52 aa, Homo sapiens
ISTASSESLLMPTLTLFPSALIATGGHAQHQATSEPRRSSVAFPWPFAIRCL

SEQ ID NO: 6085 - protein, 27 aa, Homo sapiens
MQLKYMLLTFFFFLKSSVDKTRGMWTF

SEQ ID NO: 6086 - protein, 15 aa, Homo sapiens
LHLPAISLPLLLSGV

SEQ ID NO: 6087 - protein, 62 aa, Homo sapiens
MEPWPSLWGWMPHSTASWRLLTMAGAGWSWLPTSACSVLPRWGPSCSMRCAGWPEARQAKLG

SEQ ID NO: 6088 - protein, 20 aa, Homo sapiens
LAVFRAVMFLGYVQDFRVLA

SEQ ID NO: 6089 - protein, 38 aa, Homo sapiens
MLGCLLVVFLCCLILGKLLCKAKNPVNTILSFTGRHYW

SEQ ID NO: 6090 - protein, 59 aa, Homo sapiens
MLVSKNQQKKKLRKLRTNIKKIKFRIRMISLICPFFLWSKTLLNFCKYFDLMCLRSSLF

SEQ ID NO: 6091 - protein, 22 aa, Homo sapiens
IFLFLPIFSFPQIFLLLFYHLE

SEQ ID NO: 6092 - protein, 36 aa, Homo sapiens
LLGVGLAVVVSLTLTAVILVLTRRCRTASHPVSASE

SEQ ID NO: 6093 - protein, 54 aa, Homo sapiens
MQYVLNKYILRQTEQGPSLFCLQLCFLIAAFQNVTLANYQERGTNLRDPDQTAS

SEQ ID NO: 6094 - protein, 58 aa, Homo sapiens
MSLSRAAQGPHSWLLTLASPMAALQTLLLSSPHIRTCCSHSGVLKSMNRYCCIFHNAD

SEQ ID NO: 6095 - protein, 70 aa, Homo sapiens
TARRSAALWAQPAARKAARGSGPVWLGAAAQVVARAVVARSPSRPRAQPQSASSRSGTRPTPVSVPGCAC

SEQ ID NO: 6096 - protein, 62 aa, Homo sapiens
LVATIRKSNTNSNCFLLFTFASLLVELWQVLISNTEHDLPPANVEPGIAASPDSSFIHSDSP

SEQ ID NO: 6097 - protein, 52 aa, Homo sapiens
MARSSLFSGLTIPVHPSPSTWEPQKSNCKLGASRSRLTSTGAWLRVPSWSPK

SEQ ID NO: 6098 - protein, 9 aa, Homo sapiens
LVALITVMI

SEQ ID NO: 6099 - protein, 65 aa, Homo sapiens
LWWALSPGFLAACCACGSLGTVGLCVCPCVCMCVCMFLSPLDSCTKWLMGTISRQIVKIDRKSFS

SEQ ID NO: 6100 - protein, 56 aa, Homo sapiens
LLLLLLFQEHTLRTIVLLLCTPTHSQLPRKKSTSRAKISVEVLVPYLVQDLPSRIS

SEQ ID NO: 6101 - protein, 76 aa, Homo sapiens
ISVSFIVALLSAREPLAPGRHSCFSAPFLSARWMLMHWRSFSLPLHGACWRRRELCWHEPQFLDWRPSTLLVEALF

SEQ ID NO: 6102 - protein, 26 aa, Homo sapiens
LNIAMKFSFVIGSLGRVSFCSTCCLP

SEQ ID NO: 6103 - protein, 36 aa, Homo sapiens
MAANALPACVLTGASGRLLAGATQRVPACLLHRLQR

SEQ ID NO: 6104 - protein, 43 aa, Homo sapiens
LELFPEHRTKRQESKVVMSLVICLLLKVTSRASSWHCFWNTVT

SEQ ID NO: 6105 - protein, 32 aa, Homo sapiens
KMCEFFSVSIWMCPVLSCVFSALSMVSFSENE

SEQ ID NO: 6106 - protein, 33 aa, Homo sapiens
MARAAAAACGSCSWRCCGHTPATRSRPSAFGPI

SEQ ID NO: 6107 - protein, 33 aa, Homo sapiens
RYKRKITEKKRKEPQRSCSVQSQILLLLLWLIG

SEQ ID NO: 6108 - protein, 71 aa, Homo sapiens
RTEARLVFLQKFPPWAVVEVVTVIVAAPAAATATTRDGGGCSRNCNIPEVFPELLGCPNRRGPPGGVRGAD

SEQ ID NO: 6109 - protein, 35 aa, Homo sapiens
IPKKKKKKKKKKVVTIAFSVSYLFWFAETSPKQEI

SEQ ID NO: 6110 - protein, 20 aa, Homo sapiens
MGLMGPMLLTAVSLLLWMLE

SEQ ID NO: 6111 - protein, 63 aa, Homo sapiens
MSPSRHMDQAVILLFWQMTLNVYRSFLVLSMETSKSAVWSVLTNKEELQLHMVMLFVYLSPWA

SEQ ID NO: 6112 - protein, 91 aa, Homo sapiens
MKAQMQAKSLEFSAHSKCSMNRLAAVRWGHSLLLSGCLTVPCPCLTGPSISAGELSSADKPAWHGALPLLLVPDPFCPEENFLSPGDAWPR

SEQ ID NO: 6113 - protein, 81 aa, Homo sapiens
RTGLGFHLCVCKCVCACVQVSVCKCVHMCACACMCTCTPMCECVQVCECVQVCVRVSMCVQVCACVRVCACVCSGACGSRV

SEQ ID NO: 6114 - protein, 21 aa, Homo sapiens
LHIWLLGFARAFLFCQTSHAG

SEQ ID NO: 6115 - protein, 9 aa, Homo sapiens
LLFIINLLG

SEQ ID NO: 6116 - protein, 53 aa, Homo sapiens
TPATPAALRTVLAVAAAAPVSRWARTQPLGAVAFPASQRQKRGSGTQKVGLRL

SEQ ID NO: 6117 - protein, 73 aa, Homo sapiens
LSLPGSLSLCLCPRAPPQPLPRSPSRVPFSERSSALRAALSGRPHSSGLPLRAPPDLLGFPLRTPSTLPKGSP

SEQ ID NO: 6118 - protein, 9 aa, Homo sapiens
LVFSLVSFF

SEQ ID NO: 6119 - protein, 28 aa, Homo sapiens
LPLPLILPCLAANPGARADPPLPLPFSR

SEQ ID NO: 6120 - protein, 41 aa, Homo sapiens
TRRKVPSPLATSLPALTAHAVILVTEKLFAWKVPACLPAGP

SEQ ID NO: 6121 - protein, 8 aa, Homo sapiens
VLVTLAFV

SEQ ID NO: 6122 - protein, 64 aa, Homo sapiens
VWLCLSSALLSPPFFLSVPRVRPPPPPRERRRRGSGHSRSYLVVSGCHDLYSTALQRRAQLDQF

SEQ ID NO: 6123 - protein, 52 aa, Homo sapiens
MAASRGGCLQLLQPQWACVTCALLVLLSVGSLCSSAQLDPLPYCKDRGLSVS

SEQ ID NO: 6124 - protein, 54 aa, Homo sapiens
ICLLLILMLPAQQVHQRARMNYGCHECPCEAVGKPWLDCEGYLKSILESTRSSM

SEQ ID NO: 6125 - protein, 13 aa, Homo sapiens
IGLSGLLIPATFW

SEQ ID NO: 6126 - protein, 46 aa, Homo sapiens
MKDGAPDAAVLLVQPAAPESAASTTARAGGPASAAVGAEQPLLQDV

SEQ ID NO: 6127 - protein, 46 aa, Homo sapiens
MGALLGAPSPGRGRGRCCCTKVPRTALASLCATSSCTHPSRPCTAA

SEQ ID NO: 6128 - protein, 80 aa, Homo sapiens
MRPKAPAASLLATFPISQRLIPLTPARKHCPSESETSTWVVSKAPATPRTRGAGPTSPPRPTRRRYGVQFAEAVCCGRGV

SEQ ID NO: 6129 - protein, 61 aa, Homo sapiens
MVSGAGVSAVAPLPSPSCMLLPAGNPDDLQCSQGAGSAVQTQGSHGTRRSQELDPKAVRGC

SEQ ID NO: 6130 - protein, 97 aa, Homo sapiens
IIGVLRKVRLAGTWLWVGWTGCRTECPAVGRSMRQSDAHPGAQHRSNCRRHCLRLCAARGCVPEQEARFLGLELPFLASGKSPRTESKGQILSVSAV

SEQ ID NO: 6131 - protein, 34 aa, Homo sapiens
IIFFLSSSFLTTLIVGRSKCSFILVLVQVQELKT

SEQ ID NO: 6132 - protein, 17 aa, Homo sapiens
ITGMLYWTSLLSSAPAP

SEQ ID NO: 6133 - protein, 32 aa, Homo sapiens
LMLLTTWLLHSHQTRDAILDFPTLICSSPLTL

SEQ ID NO: 6134 - protein, 49 aa, Homo sapiens
VRNFLFLPSLRLQCLMGLPVGGSVFAVPGRSGEPWEEVLRRPSLGSPQD

SEQ ID NO: 6135 - protein, 145 aa, Homo sapiens
MALSPPSPLTRSCALSWPRNGTSPSGALVGRTSASCGLAISMLSLAGTAPWKVAGRWHSKALQRCSCPQTPSLPRPCLRTTTCSVPSFSASISPPCGTTTSTAGTPRAATRSLHFCVKEVKHVLTSRTTWWMKGSTSPLRGTTHA

SEQ ID NO: 6136 - protein, 25 aa, Homo sapiens
MLLFPLFLLLSLDLCQKEGYAESLI

SEQ ID NO: 6137 - protein, 55 aa, Homo sapiens
MTLPLPEFPALFHLIQLQLALRHGLAARRAGPAAGPAAAQRLTVAQHSHSAHRAG

SEQ ID NO: 6138 - protein, 58 aa, Homo sapiens
MAQSCKDGCGSLISPWLTCVCNAAAVARGKDTASDSNSDSLLQCVTLSQSQISAFSQL

SEQ ID NO: 6139 - protein, 134 aa, Homo sapiens [sequence omitted]

SEQ ID NO: 6140 - protein, 64 aa, Homo sapiens
MRNGGLRSRRKISSPTSPLLQSALLSTRDLQWRPQAAASVFDRPFVSTLPALAGWVRQASPARL

SEQ ID NO: 6141 - protein, 129 aa, Homo sapiens
MGLRQPPSTYWAQAQLLALSCTPNSTQTSTHTHTHTLTHTHTWRARSTSTSTISARRHRICSGHGGAGQTGRLGGWRTELQTKAGDPWRGGMASTPGSLCVRHSPWTHTHRHTHCLDACMHTHARTRAP

SEQ ID NO: 6142 - protein, 53 aa, Homo sapiens
MFLLRSSSSFPALLLPLQISPPSASDWIKGNHFSKGSLALSFQAILQPPEPST

SEQ ID NO: 6143 - protein, 50 aa, Homo sapiens
MKGLVKGLQGDGLGGRRFLFLLPFCLCSPNVPVSPLPHLGPLFGPCGQSC

SEQ ID NO: 6144 - protein, 32 aa, Homo sapiens
IDTLKVLHMIRKQLWKMTAFISLNILPYGTDQ

SEQ ID NO: 6145 - protein, 14 aa, Homo sapiens
MRLGLQKLLYGILF

SEQ ID NO: 6146 - protein, 50 aa, Homo sapiens
LESPAAVGLLLLLWLSLPVRLPSFVVSQRCAGLLLAALRIQGVGCQVQVS

SEQ ID NO: 6147 - protein, 33 aa, Homo sapiens
MSLLKAVPCFQAARLAFLCSRGLQVFLSVAAEL

SEQ ID NO: 6148 - protein, 6 aa, Homo sapiens
VLVFLM

SEQ ID NO: 6149 - protein, 29 aa, Homo sapiens
LFRPRRRFPVTRALTSQLSLAVLLRVPGA

SEQ ID NO: 6150 - protein, 36 aa, Homo sapiens
MSPPAAAAAASASRARAPASRSRSRCLGHWPPDPRL

SEQ ID NO: 6151 - protein, 29 aa, Homo sapiens
LSLPASTLAAACQSSAASPSPTTEARGRQ

SEQ ID NO: 6152 - protein, 37 aa, Homo sapiens
MSFIFISSFFLMVKPCENELQYYSFNSHGHSHSEERS

SEQ ID NO: 6153 - protein, 42 aa, Homo sapiens
VSSWCTCLWALPSALPGGPARALCAQDAPASRRGPAPAQTGR

SEQ ID NO: 6154 - protein, 14 aa, Homo sapiens
ISSFLFLLGLGSLL

SEQ ID NO: 6155 - protein, 49 aa, Homo sapiens
RVLKLSSLWGCVFLVPGSPRLPRRTWKRKEQSLQRLQREDKKRLHLGEF

SEQ ID NO: 6156 - protein, 41 aa, Homo sapiens
ILWRGLLWTFTFSSSSAIAGEGAIPDPQACPPLPQTPHQVL

SEQ ID NO: 6157 - protein, 107 aa, Homo sapiens
TRARRRRKRRTWSPRRRRRRTATPRRPRILRTTRRMRWKRTTMTPIIRRRWKTTTTTPVTARKAASGAIVPTAALQVGENQEYIGLVLLYWKKKTSRPLNFPSPLRI

SEQ ID NO: 6158 - protein, 62 aa, Homo sapiens
KGLLPPLPAAGFHLARACCFLRARPLPPVLLFVPFCFPHSLPQLIARHLGPCPHSPSTLQGT

SEQ ID NO: 6159 - protein, 19 aa, Homo sapiens
LQSLLILFLGVTIFEAKLT

SEQ ID NO: 6160 - protein, 41 aa, Homo sapiens
MYRCALCVQSFTLTTSLCHLAEVVWFTITAISAFLSGKPEA

SEQ ID NO: 6161 - protein, 45 aa, Homo sapiens
KFSGSPEISRVTFVRPANLIKILLESALLVSYLCQISSWETAVTT

SEQ ID NO: 6162 - protein, 31 aa, Homo sapiens
IVFLLQVLLMFKIACQLLSHEFSNKKMKSLC

SEQ ID NO: 6163 - protein, 63 aa, Homo sapiens
LCPFLASLAACTSRLVGRTVGRACGSPPRPPRGLGPAAASSTAAGWESPRDAASGPAPGLCPH

SEQ ID NO: 6164 - protein, 6 aa, Homo sapiens
LFILVL

SEQ ID NO: 6165 - protein, 56 aa, Homo sapiens
MQSGPLWSGFWAPRLPGSLPFCSHLHLSSALPECWPRPAWGKAVGIVLAPSSSSPF

SEQ ID NO: 6166 - protein, 64 aa, Homo sapiens
MFSLSLSLSLSLSLSLSLSQAGHHSVISSNKTSQVPKTFNSKRNPPSPRQKRRSHRPDGVEWTL

SEQ ID NO: 6167 - protein, 51 aa, Homo sapiens
MIIWINYRLLAGLSVIIHDSGLGKRPTAYVPKKGQSLMELGGLFYAICLHT

SEQ ID NO: 6168 - protein, 66 aa, Homo sapiens
MFQRSSLLPRLLVSAGMIHRPGGAARAAAAAAARAPPEPARRRGRGLGGKSRGPRARRLFLLQPYC

SEQ ID NO: 6169 - protein, 24 aa, Homo sapiens
MSILPGLWVSLLSYTSFQVTWDHG

SEQ ID NO: 6170 - protein, 27 aa, Homo sapiens
KEKSSCHWWWLGWLITSMLSCKEEFPD

SEQ ID NO: 6171 - protein, 33 aa, Homo sapiens
MRSTLISSLDSLLPVIPHRTEAEWVVVMFDRRH

SEQ ID NO: 6172 - protein, 24 aa, Homo sapiens
ILAFFFFFFFSSPFLLPLVLQSQK

SEQ ID NO: 6173 - protein, 23 aa, Homo sapiens
LVPWVYFVFLSLLHLSRPFRAAL

SEQ ID NO: 6174 - protein, 34 aa, Homo sapiens
ILSMRELLLCLLMEVFTAQGFLILIQEIRSWYGD

SEQ ID NO: 6175 - protein, 65 aa, Homo sapiens
MQFWECSGSLCSFLSCKPWAPLGPLGSLCYTCFLSVWARAAQATPCDTEISYENTQPACSPPGRC

SEQ ID NO: 6176 - protein, 61 aa, Homo sapiens
MQFWECSGSLCSFLSCKPWAPLGPLGSLCYTCFLSVWARAAQATPCDTEEDSTLHSHLLCS

SEQ ID NO: 6177 - protein, 37 aa, Homo sapiens
MPPTLIPRELRCFLLPWPLDPAIASIPGHLAEAGNSG

SEQ ID NO: 6178 - protein, 19 aa, Homo sapiens
KDILIFLILLLIIKESLLD

SEQ ID NO: 6179 - protein, 28 aa, Homo sapiens
RLMKFAFRSLLPLCAILMPLLSILNLRA

SEQ ID NO: 6180 - protein, 17 aa, Homo sapiens
ILIFLILLLIIKESLLD

SEQ ID NO: 6181 - protein, 93 aa, Homo sapiens
LPFPFHSSFLESDIRKPARRKIQTTNPDFLLLLFMSVPVVSAPPFCPPAEGSRDGRPKASVARPAAVHEHHSPRDCGHLPDVLRSSLGGWQPH

SEQ ID NO: 6182 - protein, 12 aa, Homo sapiens
MLTSTLFIFQCL

SEQ ID NO: 6183 - protein, 11 aa, Homo sapiens
LTSILFILQCL

SEQ ID NO: 6184 - protein, 23 aa, Homo sapiens
LQRLLVFQVFLFIQLDTMMHRSS

SEQ ID NO: 6185 - protein, 69 aa, Homo sapiens
KAGSQWKKRSPRWSLTMAPACAKLVLLGTTLPEPCFLPSSGAPDTRASWWAWARRTPTWATRPRASVAS

SEQ ID NO: 6186 - protein, 33 aa, Homo sapiens
LPSVRLLQWWGQMLWTLGPAALPLLAGRCTREV

SEQ ID NO: 6187 - protein, 52 aa, Homo sapiens
MVLESTPFTTAWLQKCRKSTGLRKDTALLVLPCTILPMTRGLASYCILRTSS

SEQ ID NO: 6188 - protein, 128 aa, Homo sapiens
VNICGCPLLFFLLFQLLLLLPLPSRSRKPPTQLTLAQLQTVSSAQLYLAPRAPLRHWTHRRVFYFLQSCIAVHIFVPATSLCLWSALQPRKLLLELRPSAPAGQWRSPPSSRAQPLLLWADDAEDALL

SEQ ID NO: 6189 - protein, 49 aa, Homo sapiens
VTQPMTLLLLLKSPYLAFLKFQGSLCATYHSPLTLVPSGPIVDGCMGAM

SEQ ID NO: 6190 - protein, 45 aa, Homo sapiens
LNILRTGIFVSALLMYPQQPELPDMPSSGDDFTFDRSCPSKANMQ

SEQ ID NO: 6191 - protein, 19 aa, Homo sapiens
MATLYLLIYSFCIYQAQFW

SEQ ID NO: 6192 - protein, 25 aa, Homo sapiens
LNILRTGIFVSALLMYPQQPELPDI

SEQ ID NO: 6193 - protein, 38 aa, Homo sapiens [sequence omitted]

SEQ ID NO: 6194 - protein, 62 aa, Homo sapiens
VGQYTGLLTLFLAPQTTLYLPHCHPATLMGLHSKGRISSELFFFLKKKKKKPLVIQALSFNR

SEQ ID NO: 6195 - protein, 33 aa, Homo sapiens
LCPHQMLNLLSTLIFHFTFIRTTGAVAEMSHGR

SEQ ID NO: 6196 - protein, 22 aa, Homo sapiens
MLLLGLEGLLFMLFNALSNVFF

SEQ ID NO: 6197 - protein, 21 aa, Homo sapiens
LSSVLLLLYPLSLLSCPLLLS

SEQ ID NO: 6198 - protein, 33 aa, Homo sapiens
MIFFSLTNFLFIFAGTLFLFQTPNSSFIHAIYA

SEQ ID NO: 6199 - protein, 44 aa, Homo sapiens
LGLRVLTRGRAGRLGVPHLLALPSLPSPALQSQPSWVPATTAAG

SEQ ID NO: 6200 - protein, 18 aa, Homo sapiens
MALIYVCFNLCFVASEGL

SEQ ID NO: 6201 - protein, 28 aa, Homo sapiens
MLFKRLCIKLCTLSMCSLLYVNYTSINL

SEQ ID NO: 6202 - protein, 32 aa, Homo sapiens
LLLPLLLKFFLTLPTFPSFPSRRLRLPTPPPG

SEQ ID NO: 6203 - protein, 29 aa, Homo sapiens
MQWTAPLACSTRVILQSLSALDNGTLSQK

SEQ ID NO: 6204 - protein, 32 aa, Homo sapiens
LEAETSWSLLGLLGAHTEAAHSQTPEPQRPPS

SEQ ID NO: 6205 - protein, 65 aa, Homo sapiens
VPASFAAASAVLSAVMPSSSRCGDTTTEESLLQGLGTLLDPFLGFRGCGDQEKVRIPKSLPCLDG

SEQ ID NO: 6206 - protein, 52 aa, Homo sapiens
VRAAGAEATAAAAAGGAIAAAVAATGRGAAVGDRGRGCRRRSGWLANTWCHM

SEQ ID NO: 6207 - protein, 31 aa, Homo sapiens
RCSWASVLPLCSPWASPTSTTTCGGRTPRSI

SEQ ID NO: 6208 - protein, 49 aa, Homo sapiens [sequence omitted]

SEQ ID NO: 6209 - protein, 30 aa, Homo sapiens
MVLLTFWKVSLSSSGRISISLSNSHLPFSP

SEQ ID NO: 6210 - protein, 75 aa, Homo sapiens
MSLRKMKAVVARTGAAAVSGEGRRMQRPPAWSAGPGAATRAGRGGSTPWAPHSPPQVLRMASRETRKWTPWLLES

SEQ ID NO: 6211 - protein, 46 aa, Homo sapiens
MNENGKFPGLPSAQLSCLPPFASAAHASLSSVFCAWTLWAHPGHGG

SEQ ID NO: 6212 - protein, 15 aa, Homo sapiens
MVILLGWAVDLIRIY

SEQ ID NO: 6213 - protein, 27 aa, Homo sapiens
MPPLSCSLATFLSEARGASWTMQMNFG

SEQ ID NO: 6214 - protein, 46 aa, Homo sapiens
MNPHFKSSCLLEVALPVTSLHFSIHGCYSRKSSFLKHISRHMMRLM

SEQ ID NO: 6215 - protein, 35 aa, Homo sapiens
ILFLFLFLFWPTAAAMALSSSAGVHPASWVPELPV

SEQ ID NO: 6216 - protein, 36 aa, Homo sapiens
LRRLVTRLSTSLLPPPPGVALAGDVVSVMAAARPGR

SEQ ID NO: 6217 - protein, 60 aa, Homo sapiens
RCGTHWLPTKAPIRRLPHCKTTWLSLCTAMSPLTTEIWALRRGNSSASWSRAASGGRRSP

SEQ ID NO: 6218 - protein, 45 aa, Homo sapiens
LAAAVSLRRSRMRPAAVAPASAGAAAAEAAAEAAATAAPPPADLD

SEQ ID NO: 6219 - protein, 55 aa, Homo sapiens
MTSFKTAKKMNRERKLKLSKRQQIDGILLCCLGWSPSLKRSSFLGLPKQWDYRAW

SEQ ID NO: 6220 - protein, 37 aa, Homo sapiens
MVWPRAKSHLCSSSCSSPLSSRTAWGELVSKSLARVS

SEQ ID NO: 6221 - protein, 26 aa, Homo sapiens
MTKNVLKNMTFYKMAVIICLHLMHVF

SEQ ID NO: 6222 - protein, 19 aa, Homo sapiens
LAAPRRALFFRLGMLLTAG

SEQ ID NO: 6223 - protein, 34 aa, Homo sapiens
ITQSAVIVISMASSLHSSSCFQPPKPEHCLASNH

SEQ ID NO: 6224 - protein, 45 aa, Homo sapiens
RLPKLAGHFAAVCGGAASGMPKPKAGRGINYKWSRLHPFEPRTCL

SEQ ID NO: 6225 - protein, 82 aa, Homo sapiens
LARPLAPSLLPLSLLPVPSPSLTSFLPTSPLLGFLPHPLDSPLPALALSLALSAAPAMTEAGAGAVAAAAVAGGESGSQKVA

SEQ ID NO: 6226 - protein, 16 aa, Homo sapiens
IFPLALCLYFCFVFDS

SEQ ID NO: 6227 - protein, 30 aa, Homo sapiens
ILTTLLLCSLGMLLCLCIWSLFGATVDRHL

SEQ ID NO: 6228 - protein, 23 aa, Homo sapiens
MPCTGLAASVSPVSSQDGPDSLR

SEQ ID NO: 6229 - protein, 49 aa, Homo sapiens
RTLNRRISHLQGTLPFILHFVTNLQNSINWVGFHPFLAKFLKLNPLVRV

SEQ ID NO: 6230 - protein, 42 aa, Homo sapiens
LFWKMWTSTKWFHWKQIVVLTMHPFPQALNSQQVPTRMMMSS

SEQ ID NO: 6231 - protein, 46 aa, Homo sapiens
LISHLLSPITSILFPPVSPSPPQFPPCPSFPPSSPSPGHFANLWLL

SEQ ID NO: 6232 - protein, 45 aa, Homo sapiens
VALVAAAAAAAAALERFLSGSAGGPPGWSTCKSRSGAPGIDGDEL

SEQ ID NO: 6233 - protein, 13 aa, Homo sapiens
LSVVDLSLICILL

SEQ ID NO: 6234 - protein, 56 aa, Homo sapiens
LRNPARKDIGGGLALKLLFKTRKRRRKRKKRKMLGNIYLTCSTARTLASCCYSCKY

SEQ ID NO: 6235 - protein, 69 aa, Homo sapiens
LVLLGRPPVGMGLSVLLPLCLLGPGRFTSGQKPLDTPGLGAAVLSVRKAGLKMRSHLTPSVCTVPSPGS

SEQ ID NO: 6236 - protein, 19 aa, Homo sapiens
LIVLFFLLAVHFGGYYKEI

SEQ ID NO: 6237 - protein, 106 aa, Homo sapiens
MPRLSLVVLLLSILDGAPGHHFRLSEYCKKQAQTSPKQSCHTWIGLFLIRKSSWSLLNLAATWNMISLVLNYFITNSAQILTCLMITKELEGCVSWWKRAVKIEFW

SEQ ID NO: 6238 - protein, 26 aa, Homo sapiens
LRPKRRSVAGVVAAAATVSWGPRAAL

SEQ ID NO: 6239 - protein, 11 aa, Homo sapiens
TTLLLSLCTCV

SEQ ID NO: 6240 - protein, 29 aa, Homo sapiens
LQFLAYLCSLILSCLFVVLKGRSFVLWVC

SEQ ID NO: 6241 - protein, 9 aa, Homo sapiens
IYDWLLGLL

SEQ ID NO: 6242 - protein, 34 aa, Homo sapiens
MPRPRACASWPLLAAVSGLRGLEWPPSWRRWWQQ

SEQ ID NO: 6243 - protein, 8 aa, Homo sapiens
LWLLFAVV

SEQ ID NO: 6244 - protein, 13 aa, Homo sapiens
VWGPVTIWSFVLC

SEQ ID NO: 6245 - protein, 28 aa, Homo sapiens
TARLKSLQWLTKLILVRVTLATDLSMEG

SEQ ID NO: 6246 - protein, 45 aa, Homo sapiens
MPVGIFCHMACTIPSRAAGGREIWMAQRTGCTTEFLTRRRTCFLT

SEQ ID NO: 6247 - protein, 22 aa, Homo sapiens
MNLPGTAAAADLLAIFSQSAPC

SEQ ID NO: 6248 - protein, 33 aa, Homo sapiens [sequence omitted]

SEQ ID NO: 6249 - protein, 26 aa, Homo sapiens
TRRTGSSLTFWMSLSSTRSVRRPVGG

SEQ ID NO: 6250 - protein, 19 aa, Homo sapiens
MFFIMILMQGIQMIMDRII

SEQ ID NO: 6251 - protein, 38 aa, Homo sapiens
LSPVPQQQVVLIALFVQCFGLGPSAFPRSSTLHPAQPC

SEQ ID NO: 6252 - protein, 9 aa, Homo sapiens
ILFSALILR

SEQ ID NO: 6253 - protein, 18 aa, Homo sapiens
LVSACRFFLCLFSALPRP

SEQ ID NO: 6254 - protein, 10 aa, Homo sapiens
LSLDKIEKNS

SEQ ID NO: 6255 - protein, 16 aa, Homo sapiens
VAQFFLALLLQVNWWI

SEQ ID NO: 6256 - protein, 20 aa, Homo sapiens
ILFHAGGLATKACLLAAAIC

SEQ ID NO: 6257 - protein, 21 aa, Homo sapiens
MERGILWMLVLLNPLPAGPPG

SEQ ID NO: 6258 - protein, 22 aa, Homo sapiens
KNFLHQIFIFLSLPSRATCTSY

SEQ ID NO: 6259 - protein, 12 aa, Homo sapiens
MKGWLSLPLMVT

SEQ ID NO: 6260 - protein, 26 aa, Homo sapiens
RFYRITLTKVPWSFMSQHILLFLFLQ

SEQ ID NO: 6261 - protein, 12 aa, Homo sapiens
VSLWLFVMLPKI

SEQ ID NO: 6262 - protein, 35 aa, Homo sapiens
VMLLLIYLGSWLAGEAEPLLKAWLPRKICSVQPRA

SEQ ID NO: 6263 - protein, 23 aa, Homo sapiens
LCMLLTVSLFSSQLRVKISPSGQ

SEQ ID NO: 6264 - protein, 70 aa, Homo sapiens
MPLDAILGVLLFGCHGQYYQAEPILRYPSHQTRKRVRLREETTGNGAAAGLSSRNEDRDEARSTHQLPPA

SEQ ID NO: 6265 - protein, 13 aa, Homo sapiens
IAADTAAVWLGLL

SEQ ID NO: 6266 - protein, 71 aa, Homo sapiens
LLSPCLGTAGTCLATSSGGPRPPSSSLPSFLLPCPISAAPRSLRRAPWLLGRAVVGWPRPTPYGGGSSPPF

SEQ ID NO: 6267 - protein, 12 aa, Homo sapiens
MWLCSLMWIAWI

SEQ ID NO: 6268 - protein, 22 aa, Homo sapiens
LDLLFLTSRWLAIIPLSGSWTL

SEQ ID NO: 6269 - protein, 47 aa, Homo sapiens
MTRPFFAVSGRALWSRPQAACVGRLVWRTSPRLTCKDDAERNNKAYL

SEQ ID NO: 6270 - protein, 40 aa, Homo sapiens
KAFFPCYLCRYFIFLAFLEITTSCGSVSGNFTDLSPPSHK

SEQ ID NO: 6271 - protein, 39 aa, Homo sapiens
MIPESKREELGFANLVALSVSCFSKAAVQKERRYQEGTC

SEQ ID NO: 6272 - protein, 38 aa, Homo sapiens
LARLLVFVLFQAALSSGVTRCQSAEKFIVQHHHKLTME

SEQ ID NO: 6273 - protein, 39 aa, Homo sapiens
ILLDKWTSIYCAFTAAITIASSKTVSSAPSSGWMGNCSC

SEQ ID NO: 6274 - protein, 12 aa, Homo sapiens
LAFRALVLLDLL

SEQ ID NO: 6275 - protein, 72 aa, Homo sapiens
LWRTRLGVRVQAGSWASPSTCASLGPWFCLAWGSSSSQVASQSLRLGPWRKWSGRSSQTPRCWKLWGTGRMG

SEQ ID NO: 6276 - protein, 16 aa, Homo sapiens
MVLLLVTFLSMDDLLG

SEQ ID NO: 6277 - protein, 29 aa, Homo sapiens
IIGMPLPVLLCLTLPMPLPSATARGGNRT

SEQ ID NO: 6278 - protein, 58 aa, Homo sapiens
LSPALLGSSGRKHVLQRLGFVSGSGIATAASVTPGDQHSRSLGTYDRGLRQQRDSEHL

SEQ ID NO: 6279 - protein, 39 aa, Homo sapiens
MESCTVGCATASSWGCTSSFGRSMGPMCFLHSPQRSFSL

SEQ ID NO: 6280 - protein, 14 aa, Homo sapiens
ISISALGSLSGIWI

SEQ ID NO: 6281 - protein, 48 aa, Homo sapiens
RAWPLGLLCPLWVPAAVLRPTSGSYPASTARGHTASCHHWPKRSSWPR

SEQ ID NO: 6282 - protein, 30 aa, Homo sapiens
LILALLHILCNLGPLSALRAGREEVLFGPR

SEQ ID NO: 6283 - protein, 61 aa, Homo sapiens
MRSTLAASIPTISSQGSSGHPFTKDWIVLWKSVLYMGITPSSFRFTQKRGSTVMGNWAMNQ

SEQ ID NO: 6284 - protein, 24 aa, Homo sapiens
MKLTACWLSVDWPGAVLQDPCELP

SEQ ID NO: 6285 - protein, 18 aa, Homo sapiens
IIGCIVAFTLFHLLDMGK

SEQ ID NO: 6286 - protein, 20 aa, Homo sapiens
IIGCIVAFTLFHLLDMDLSP

SEQ ID NO: 6287 - protein, 25 aa, Homo sapiens
TKFRSRSLTSGLFAGGVGAEPDWSG

SEQ ID NO: 6288 - protein, 32 aa, Homo sapiens
MWVIGCSLKTWALTLLLLPLRSMASRGRRSTM

SEQ ID NO: 6289 - protein, 55 aa, Homo sapiens
LLNFFMYVTLLLKHQSFSQTYGMASSQIYLIKKKKLFYRNYSQRNLRIDLTHLKY

SEQ ID NO: 6290 - protein, 31 aa, Homo sapiens
RHLLLFLLWQMLFLQLWCPQPPARALLLLFL

SEQ ID NO: 6291 - protein, 13 aa, Homo sapiens
IFQIVIIFHLWIC

SEQ ID NO: 6292 - protein, 26 aa, Homo sapiens
LLLLTLWVRTAFVSCNTHGEGLQVHF

SEQ ID NO: 6293 - protein, 23 aa, Homo sapiens
LLTPAPSTLPLAASAAVAAGGAV

SEQ ID NO: 6294 - protein, 17 aa, Homo sapiens
VSLILFQLCLWLPGLYL

SEQ ID NO: 6295 - protein, 34 aa, Homo sapiens
MWWKTPCWWTPSTTATSSSAEARSCGRLLKSMAG

SEQ ID NO: 6296 - protein, 44 aa, Homo sapiens
IRKKQKREGAGILFLYHLACLFCGNLRAVHFYQGISCFEKSLDS

SEQ ID NO: 6297 - protein, 15 aa, Homo sapiens
LYSFYCLLDFCLVFL

SEQ ID NO: 6298 - protein, 26 aa, Homo sapiens
MLCSQKDIRYFLLQLVMFLFELQLES

SEQ ID NO: 6299 - protein, 32 aa, Homo sapiens
IQSFQCLHLPVLLLGMPSCWVCSLSEVSEKIH

SEQ ID NO: 6300 - protein, 20 aa, Homo sapiens
KVNRKISRALAELHLLAFLA

SEQ ID NO: 6301 - protein, 32 aa, Homo sapiens
VVSRVWLPACLRGLFPPSSARASTSCSWGQIA

SEQ ID NO: 6302 - protein, 38 aa, Homo sapiens
ILCEKPQRRLFSRALASSSASSFASSCLLPASAAATPA

SEQ ID NO: 6303 - protein, 46 aa, Homo sapiens
TGCAFLFFTLFHFQEGLVRTSETLFSYSIGDTVHTPSTSKPLKGFV

SEQ ID NO: 6304 - protein, 34 aa, Homo sapiens
LWGRTPGGSARPWRQETALLRFCLGSLLFALDGS

SEQ ID NO: 6305 - protein, 23 aa, Homo sapiens
MGHTAVLQIFSLISLKATQQLFM

SEQ ID NO: 6306 - protein, 10 aa, Homo sapiens
MQNFVFLTVL

SEQ ID NO: 6307 - protein, 17 aa, Homo sapiens
MDLWWWFSNWNIIFTCL

SEQ ID NO: 6308 - protein, 16 aa, Homo sapiens
IWIKRFLVSIPFISCV

SEQ ID NO: 6309 - protein, 22 aa, Homo sapiens
LAALWRTTLVFFLAARGPRIHR

SEQ ID NO: 6310 - protein, 37 aa, Homo sapiens
KKCSLMLVSVIFVRPKKPISWDTWFIGYFWQLWVEEN

SEQ ID NO: 6311 - protein, 16 aa, Homo sapiens
RIPRMMNAQWLMHMLL

SEQ ID NO: 6312 - protein, 24 aa, Homo sapiens
ISILFCLTTWMATSMNLMDECLFR

SEQ ID NO: 6313 - protein, 50 aa, Homo sapiens
MESNGSIMKIMSQKMWVLCVALIYQDKRDMLPLVHLCSLFLSCSFNKCYL

SEQ ID NO: 6314 - protein, 23 aa, Homo sapiens
IKPFRVMPACLLMVCKTITFLGS

SEQ ID NO: 6315 - protein, 16 aa, Homo sapiens
IKPFRVMPACLLMQLF

SEQ ID NO: 6316 - protein, 28 aa, Homo sapiens
KLMDISILIMSVWYLYRMEKKSQVHVPV

SEQ ID NO: 6317 - protein, 41 aa, Homo sapiens
RNRTEYKILSMRELLLCLLMEVFTAQGFLILIQEIRSWYGD

SEQ ID NO: 6318 - protein, 16 aa, Homo sapiens
MLFRCEIFFLFLLFGS

SEQ ID NO: 6319 - protein, 78 aa, Homo sapiens
LLLLRLAGISAGAAAAAAAYAPWSIASWGPGRTELPGCGMRPWSFFVLRCRYGNIAVVSRAMSIVSQRPKLWIGCMSC

SEQ ID NO: 6320 - protein, 28 aa, Homo sapiens
MQNEMCQWSRAVLSLVMSYTMCLTGAGH

SEQ ID NO: 6321 - protein, 83 aa, Homo sapiens
IPTRRFLGRGPNKKREEMEITSPDLAFLSLFLFSPLPSDDWRVKGNPERGGEQRFEKMQECVWRRVKLPFKLWPPGTRCSAAG

SEQ ID NO: 6322 - protein, 102 aa, Homo sapiens
LRHHPCHCRALAALLTAWSHALRRATGGRWVTSIRAAAARRREKASKKEEWEEEGKRRRRKRRRRKRGAQRIQVSRREVNTKNHVCRAAGPVHDPGFGVGHL

SEQ ID NO: 6323 - protein, 52 aa, Homo sapiens
RLDMLTVLSPPAFGLGFSSLFTCRLSHSLPFPQHHSPRKSQCFPPIILSADP

SEQ ID NO: 6324 - protein, 20 aa, Homo sapiens
ILQAFYWPVIFLCVPYRPPP

SEQ ID NO: 6325 - protein, 52 aa, Homo sapiens
MLTSASWQSTWSPSHVSISLCLALPLSPAVEASSIELSQCRNSPSRSSMPRT

SEQ ID NO: 6326 - protein, 24 aa, Homo sapiens
TVTAIASCMPLLSTCGAFRTQTWY

SEQ ID NO: 6327 - protein, 25 aa, Homo sapiens
MEKQSLCICSLLVLGFWLLLAFINS

SEQ ID NO: 6328 - protein, 36 aa, Homo sapiens
LFFLFFFFSPCCRCLRVLPLRCRPGRRARLWVPGGG

SEQ ID NO: 6329 - protein, 13 aa, Homo sapiens
IVYQGQTLCLWLL

SEQ ID NO: 6330 - protein, 68 aa, Homo sapiens
IAPTFPSALFSPGRAAAAAAAAAAAGGGARWRRWPGSPWRTVKEAAKKKSATTTTVILEIIIMDRVIP

SEQ ID NO: 6331 - protein, 66 aa, Homo sapiens
LFLSLLSLPLFPSRRAPRPGRGSREAGGVVCYPVAPGTSLGYAPRRRSHCCGRRSAEGPRYWLPAV

SEQ ID NO: 6332 - protein, 29 aa, Homo sapiens
IASTLSFLLCTQMGWLDESSSWLSKECTV

SEQ ID NO: 6333 - protein, 35 aa, Homo sapiens
KKSRSVRRRRLGKVFLCLGSMEAASRHLPATLMLL

SEQ ID NO: 6334 - protein, 43 aa, Homo sapiens
KDRVPSGRSHAAAASGALGAADWLAVQILLNPLVKTETQNGCK

SEQ ID NO: 6335 - protein, 36 aa, Homo sapiens
KDRVPSGRSHAAAASGALGAADWLAVQGADFKSKRR

SEQ ID NO: 6336 - protein, 23 aa, Homo sapiens
VAPWALLAAALASESPARTSAAS

SEQ ID NO: 6337 - protein, 12 aa, Homo sapiens
VNKFGMVLYIFI

SEQ ID NO: 6338 - protein, 36 aa, Homo sapiens
RTAGSPCRLRQMTMAASPWTVTCSVGSATLLEPRPE

SEQ ID NO: 6339 - protein, 82 aa, Homo sapiens
MLWDPALPRLAVYASCLFFSCLDAHEGPVHGPRGRGEGGRGSERQRVRPGGGGGAGSVHIHLEEEDGAEDQDHRDEDWITKK

SEQ ID NO: 6340 - protein, 23 aa, Homo sapiens
MSKLCPILWILMKLGCSKDLKEN

SEQ ID NO: 6341 - protein, 38 aa, Homo sapiens
LIFHSSFLCLVLTVFVYFKGEKTRGTKPAGSIHHRGWF

SEQ ID NO: 6342 - protein, 79 aa, Homo sapiens
MYRSSPSPASCACASSLPPSCRPSSSTCGSATRTPAPAAPCSCWPRQSRTWATWTRRLPGPRRLGWSRCSPPCARAWRS

SEQ ID NO: 6343 - protein, 32 aa, Homo sapiens
MLTPALRHLSGSILLSLAYMDTSAHRHVTAGC

SEQ ID NO: 6344 - protein, 38 aa, Homo sapiens
MLVWLPWASAAARAFCAISVRPMAGCGQASPCWVPGCC

SEQ ID NO: 6345 - protein, 27 aa, Homo sapiens
LNARPLIPFFPPLSLGLLIKARPFPQP

SEQ ID NO: 6346 - protein, 20 aa, Homo sapiens
ILFIFLYTIFSLTNVEPSNR

SEQ ID NO: 6347 - protein, 69 aa, Homo sapiens
LTALFLLCRSAASLPRVPRAQAANTRYPWRSEVGCCTDSSAKCPPTPGAGCTRSWPRAQRRRRRRRRRG

SEQ ID NO: 6348 - protein, 10 aa, Homo sapiens
MSLWLHALLV

SEQ ID NO: 6349 - protein, 39 aa, Homo sapiens
RHRAAAPGRGAGVDPAAGRDGAGGAAAAAAGGGAGPAAA

SEQ ID NO: 6350 - protein, 17 aa, Homo sapiens
IHQYKQMHLFTLTLAFF

SEQ ID NO: 6351 - protein, 63 aa, Homo sapiens
MKLLVCFQSSTMARSSLFSGLTIPVHPSPSTWEPQKSNCKLGASRSRLTSTGAWLRVPSWSPK

SEQ ID NO: 6352 - protein, 53 aa, Homo sapiens
MARSSLFSGLTIPVHPSPSTWEPQKSNCKLGASSRSRLTSTGAWLRVPSWSPK

SEQ ID NO: 6353 - protein, 40 aa, Homo sapiens
LRLQEQLHWHGRILFQAGLLLCSTVLVEEFYPVYCLQSLH

SEQ ID NO: 6354 - protein, 67 aa, Homo sapiens
TGSGRLLSRSRQRLEARGRSPASGRSAAAPLPCALFPAGPERPPPPPGGSRAKGSREAGPGEELACS

SEQ ID NO: 6355 - protein, 46 aa, Homo sapiens
MRTRLEKAPTLQTGGSCPSCSLSLASLRLKWQLIGFILWCLAWSSL

SEQ ID NO: 6356 - protein, 26 aa, Homo sapiens
KPSRAAGVALIAGGATSWPWMSRTPL

SEQ ID NO: 6357 - protein, 17 aa, Homo sapiens
RAELGTLWAGLLPAWTL

SEQ ID NO: 6358 - protein, 32 aa, Homo sapiens
INSLCTFSFPSCLFFFVVLYSCCLSTMCQTLC

SEQ ID NO: 6359 - protein, 36 aa, Homo sapiens
LKMMIMAHQLLLTHLVISQKENLKSIRGQSNVNNKA

SEQ ID NO: 6360 - protein, 36 aa, Homo sapiens
MRKLIAGIIFLKIWTCTVRTSTDLMLSCLISGQVAV

SEQ ID NO: 6361 - protein, 16 aa, Homo sapiens
RTLRLTVFSLLMMSSC

SEQ ID NO: 6362 - protein, 46 aa, Homo sapiens
LQVRVFIMWVTVMMSNAFAVMVDSGVGNLEMIHGFNMPSGFQGVST

SEQ ID NO: 6363 - protein, 15 aa, Homo sapiens
KRPPTTLLLSLCTCV

SEQ ID NO: 6364 - protein, 53 aa, Homo sapiens
VCVLILAIGARACEPVGVAAAGTIGLSRGRHVAFRGAFMGLSGMGFLFLIVNR

SEQ ID NO: 6365 - protein, 37 aa, Homo sapiens
RSFLFVPCWKEAAVLRAQVVVFSSLEAMAHLHFCALS

SEQ ID NO: 6366 - protein, 50 aa, Homo sapiens
VLFPLCFSPVLGQSCPRSRVGLRVCAGAAGAISPLGGRWSPGARGRDHGG

SEQ ID NO: 6367 - protein, 67 aa, Homo sapiens
RSQWKKRSPRWSLTMAPACAKLVLLGTTLPEPCFLPSSGAPDTRASWWAWARRTPTWATRPRASVAS

SEQ ID NO: 6368 - protein, 42 aa, Homo sapiens
VLLIAWVVVGVSLQRRILTVKKQSGSRGPPLIPQGPDGGQRG

SEQ ID NO: 6369 - protein, 74 aa, Homo sapiens
MRLGPRRRAACGRVAFGSSTFALVPVFAHLSILQSLVPAAGAASPVAISAQHLCYSHVTPGDPGAGAGQGPAPS

SEQ ID NO: 6370 - protein, 33 aa, Homo sapiens
TVWSCVISSCVALSSLTVRGRSWCWRTWRTPAC

SEQ ID NO: 6371 - protein, 34 aa, Homo sapiens
LRWRCCSSACWVFWSPPRMVVSIYPMPFLGMTLT

SEQ ID NO: 6372 - protein, 32 aa, Homo sapiens
MVFHLPLSDLFFMLLLAPKKSRMAKEPRTYWN

SEQ ID NO: 6373 - protein, 86 aa, Homo sapiens
MTVSLFLLLATSQSQDGCCDSGSCPNSRQQEGHGAAPASRCPCRPSLQAQEPKEESTQMWWLTPVIPPLWEAEARGSLEPRSWRPT

SEQ ID NO: 6374 - protein, 33 aa, Homo sapiens
IGSASCLTSAQDFRASWCSTALVGALALASPHS

SEQ ID NO: 6375 - protein, 27 aa, Homo sapiens
LTSAQDFRASWCSTALVGALALASPHS

SEQ ID NO: 6376 - protein, 46 aa, Homo sapiens
KTLKDRHFWQSCSLLAQLSFLCLDPLGPSWPWWVKTLICPVTCSRP

SEQ ID NO: 6377 - protein, 34 aa, Homo sapiens
KRRRKRKKRKMLGNIYLTCSTARTLASCCYSCKY

SEQ ID NO: 6378 - protein, 82 aa, Homo sapiens
MAQKPFLWQRWGFGRLTMLLHSLRVLAQSRAVVYLTSNGRCVCVCVVGEWGGVLFLQCCLPGSCSSHTYLWVAGEEDQVRMQ

SEQ ID NO: 6379 - protein, 79 aa, Homo sapiens
MQVQVTILFLATSCEKTNIWVTLVSTLVLLLVIVASAAIDHTRVVIQKLGFRWHLCQGLPTTPGLPATSSLPIISRSSR

SEQ ID NO: 6380 - protein, 78 aa, Homo sapiens
MWCLVIAVSVALPCFPGWVFASHHGGFCTTGTWLSCGWSSIAHQAGGENEEDRGLLTASHHSSAAQGQSGHEREEADI

SEQ ID NO: 6381 - protein, 41 aa, Homo sapiens
MGSRVLRTGKLLEAAGAGPGSPALAVFAFGRGQSLLFQVPA

SEQ ID NO: 6382 - protein, 76 aa, Homo sapiens
MQRMGRLRPWLCVPLRVGAGLGPNSTAAGFSLISEPRRWQSGRPGQVNPRAAGAQAPTPAQRGRKGPPPAQRAQRP

SEQ ID NO: 6383 - protein, 80 aa, Homo sapiens
MQKSPSSASLTLGAVDQSCSYSAILAPYSHYLLELWLRHYNRALSPLSKSWEMVIVNASPILEAPGCRGPQLAGCGGSGL

SEQ ID NO: 6384 - protein, 27 aa, Homo sapiens
LGFWPRRWRLWLAVTLAFQARPGEATR

SEQ ID NO: 6385 - protein, 62 aa, Homo sapiens
MFLKLMATYSAAFLPVVIGLDRQAAVLNPLGSRSGVRKLLGAAWGLSFLLAFPQGSRTRNTI

SEQ ID NO: 6386 - protein, 199 aa, Homo sapiens
MVSAQTEPREDFFGDVSPRKVWAAFLTLDACGQPSSPWMPVGSLPHPGCLWAAFLTLDACGQPSSPWMPVGCLPHPGCLWAAFLTLDACGQPSSPWMPVTWFPWGLPKLRDPKPPSNLMTRLVSEHTCVVPEPLTNPLCNPAHAFPILKGPAHRPAHVFPLPLLCPYLVGSCPFWALVWHFTHKCVLWVVSGPPPAVRG

SEQ ID NO: 6387 - protein, 28 aa, Homo sapiens
MARPASYGSTLRRVPGCILCLPNSASWV

SEQ ID NO: 6388 - protein, 47 aa, Homo sapiens
MTQPLPDSQGPCSWTLAAMLGGSPAATQRGHDSRGPSQASINCPTRQ

SEQ ID NO: 6389 - protein, 109 aa, Homo sapiens [sequence omitted]

SEQ ID NO: 6390 - protein, 41 aa, Homo sapiens
LLATSLKWNLLVALLPLQLWCYTEKLEVSKQTREKEKHQKV

SEQ ID NO: 6391 - protein, 46 aa, Homo sapiens
ISVLSRLKVTRLLLPIFRLLLAEAERLTLHNMAAWCVWCPRADESR

SEQ ID NO: 6392 - protein, 12 aa, Homo sapiens
LFFRLGMLLTAG

SEQ ID NO: 6393 - protein, 48 aa, Homo sapiens
IPASSTTMCSEHVEEKKQLYLLVSFCLSSWTLTFSETQQSLQWSVGPP

SEQ ID NO: 6394 - protein, 18 aa, Homo sapiens
LFTTAHSGAHGMLAVLVL

SEQ ID NO: 6395 - protein, 14 aa, Homo sapiens
RLAGLLIFFLISNF

SEQ ID NO: 6396 - protein, 39 aa, Homo sapiens
TVSPAVSMIVFLLQVLLMFKIACQLLSHEFSNKKMKSLC

SEQ ID NO: 6397 - protein, 12 aa, Homo sapiens
MFLGSLMTFYTL

SEQ ID NO: 6398 - protein, 16 aa, Homo sapiens
LYLLIYSFCIYQAQFW

SEQ ID NO: 6399 - protein, 43 aa, Homo sapiens
VNVLLPSCGCSTACSTTASQPSSGPCSGIDSISENSTQMLPSC

SEQ ID NO: 6400 - protein, 31 aa, Homo sapiens
LWRRSHRCSLMSSLWSQLVPVAARRQKAVSE

SEQ ID NO: 6401 - protein, 17 aa, Homo sapiens
IAVILKVFFLPLFPSQR

SEQ ID NO: 6402 - protein, 28 aa, Homo sapiens
ISTVALMSMLTASMLDRQSFYCWIVQDI

SEQ ID NO: 6403 - protein, 22 aa, Homo sapiens
MYCFCIYLVFTLGKSFPTSSKT

SEQ ID NO: 6404 - protein, 34 aa, Homo sapiens
RRTGSAQSRGSAMNLPGTAAAADLLAIFSQSAPC

SEQ ID NO: 6405 - protein, 35 aa, Homo sapiens
RKRRRKRKKRKMLGNIYLTCSTARTLASCCYSCKY

SEQ ID NO: 6406 - protein, 29 aa, Homo sapiens
LAKPLLSFLLPPLSLQLRDGPGSSVSAVL

SEQ ID NO: 6407 - protein, 75 aa, Homo sapiens
RTAELPLVLLGRPPVGMGLSVLLPLCLLGPGRFTSGQKPLDTPGLGAAVLSVRKAGLKMRSHLTPSVCTVPSPGS

SEQ ID NO: 6408 - protein, 65 aa, Homo sapiens
VWWGMVPLWTCCCWSCTWRMSAAVVGGPWRTCNAYPGPWALLPPSSSGKWQNECCSRSTGCRAQS

SEQ ID NO: 6409 - protein, 120 aa, Homo sapiens
VAAPRRTSASRWWIWRPWAGCWVRCCCWLSLASPSLSTSTMAPGSSAAVAKLRSPSPKALTTRRSSLTTRPTGRPSPAPRTTPSPRRHRCPQSPHPPALPPQAVPLSPPQRPELAEAPRR

SEQ ID NO: 6410 - protein, 25 aa, Homo sapiens
VELQRLLVFQVFLFIQLDTMMHRSS

SEQ ID NO: 6411 - protein, 53 aa, Homo sapiens
LSCLLAVPAVPAVPALSPLLPRLLDAGDASELVIGALRRAQAPSSARGAQAAP

SEQ ID NO: 6412 - protein, 57 aa, Homo sapiens
VTAMSSWARRRSSSSRRVSARGMHTRLIPSLPGSPVCWAWPWYPDTTSFPLRCRGRV

SEQ ID NO: 6413 - protein, 33 aa, Homo sapiens
KSFCVLYGDVAVLFFRSLAPSASIRCTSCCPVP

SEQ ID NO: 6414 - protein, 14 aa, Homo sapiens
LVLTVFLECFLLFS

SEQ ID NO: 6415 - protein, 12 aa, Homo sapiens
MMTWSIWNVLML

SEQ ID NO: 6416 - protein, 47 aa, Homo sapiens
MTSPCFTSLSPTGLALARGRSRIRSRRRHIRNKFQFQSTTQHLARLG

SEQ ID NO: 6417 - protein, 94 aa, Homo sapiens
MSLRRGETSSSLQLVARLLSLSQEDALLQVWNLLLRALAWQLTLDLRVLRSLGTHLGAVAFRDRPSYRCNNLLDILLWKRKRTTRGSMALGCRN

SEQ ID NO: 6418 - protein, 58 aa, Homo sapiens [sequence omitted]

SEQ ID NO: 6419 - protein, 95 aa, Homo sapiens
MCAFVSAAIPSSVIALLHFCWSQGRGVPANVRVVRPQPLPFYTVLGCLLACGGGRGSQYLCTVYCPEPAFIPNFSKIALKGGGRGSNIVLKGGTG

SEQ ID NO: 6420 - protein, 56 aa, Homo sapiens
LYFGWKRHRRGCVLSLKISISCGLDQKLLITYLEGIYKCLSMCSLFVHVVYYITKE

SEQ ID NO: 6421 - protein, 12 aa, Homo sapiens
LWFSCGMLWIML

SEQ ID NO: 6422 - protein, 33 aa, Homo sapiens
MMAFICLYIILIPVRGKCNTLTTALEIASHLDC

SEQ ID NO: 6423 - protein, 44 aa, Homo sapiens
MYGESKRAAIAVMLGVLTKQVGCGHSRGAKISRNSQQVTWRRII

SEQ ID NO: 6424 - protein, 145 aa, Homo sapiens
LPENRIIPLVLFHFLLLPLLTPQPPPPPRRPRLWLHGSAARARGLRAGPQGRGRRRRIMKAGVATAPDGGQQPEDEPEQPPPRRHPDAEQQSPPPPQQQLRARADPEPEEEGDRDPEEEEEEKARPLARPDLPFSRLLPLDRRDL

SEQ ID NO: 6425 - protein, 51 aa, Homo sapiens
VEQELSWLWGFLVCQMTRQMPAPNLIPSGGLADVEVARALMEAGQKPKSRL

SEQ ID NO: 6426 - protein, 88 aa, Homo sapiens
VARFSTARGSARSPGLEGCFFPTAAFLPHAWPPLGGVWMAGRVGFLFIPTAHSLGPDIFSSSSCRASRAGEEHILSMELVVKVDRGRW

SEQ ID NO: 6427 - protein, 62 aa, Homo sapiens
MHLGKEDLPAFLTSPLGFLLCSPGLWLSLLVLCWVTCHCSACMPCRSWLEPAGGDLPETLVK

SEQ ID NO: 6428 - protein, 42 aa, Homo sapiens
MVLILDSLSVVPSVLSWLFPESSGSLHIKQMLHRWICLDLPI

SEQ ID NO: 6429 - protein, 19 aa, Homo sapiens
LSLVVLPMCLLHHFLPASA

SEQ ID NO: 6430 - protein, 79 aa, Homo sapiens [sequence omitted]

SEQ ID NO: 6431 - protein, 48 aa, Homo sapiens
LKGFVSCLLPIISSALKNLSCPQFIMSRRFIFSLCFFLFQFILNAYFS

SEQ ID NO: 6432 - protein, 73 aa, Homo sapiens [sequence omitted]

SEQ ID NO: 6433 - protein, 42 aa, Homo sapiens
LSLDAKEFSVAQLDGWISLSSCDLTFCVSVSLISAGVPGGAG

SEQ ID NO: 6434 - protein, 82 aa, Homo sapiens
VDSASISASMATFRRQRRSCVFLCTQLTACLYGASLSGRKCLKKQRSRWCVHSADQLVWPGPGGLVARKFQVEGKCRGYLQI

SEQ ID NO: 6435 - protein, 46 aa, Homo sapiens
LSVFREGRGFSRFTIWVVYMLVEILPVCLEGSVNVRALEINKITAT

SEQ ID NO: 6436 - protein, 95 aa, Homo sapiens
LRPARAALVAPLPTPRRGLAAAAAHLPPQPPPATRTFSGPAPSGSPGTARHPRAADPARAGAPGRARHSAVASAARAAPEPRTGAQSAGDSGADP

SEQ ID NO: 6437 - protein, 42 aa, Homo sapiens
LRLCPRCVRPLSVTLCVSRCLAVAVTPRLSPSTSWTLPRKLH

SEQ ID NO: 6438 - protein, 132 aa, Homo sapiens
LGSSSLGEIFEFLPHPLGLLHTRPRLPASLPTHLSSFLCPPAASPALLPIPRPHSRLLPSEVVEERFPPGLVHVSRPLLAGLLGCFGPFVGTIVSHGRAGHHWGRWPTLRLLCPLGPGNIVTSRADLTNCRL

SEQ ID NO: 6439 - protein, 92 aa, Homo sapiens
MPPTPGPSILSSLVPIPVSPFHPCPPVLYLWPAPISESFFQSLIWLIPHLQLPPYMSHTIPWLALHSLLFPYSSFPVIPYQMVGTLSPALTR

SEQ ID NO: 6440 - protein, 39 aa, Homo sapiens
LRVVREFLSRILIWLLGCYLEIQALKMPASLDLEDDLDK

SEQ ID NO: 6441 - protein, 65 aa, Homo sapiens [sequence omitted]

SEQ ID NO: 6442 - protein, 256 aa, Homo sapiens
LSSRQSSSPCPRSARFVSPRLAVSLSLPSRSSAAPPSLPISGPLLRALFSPQSRPFWATPLFGTPPQSAPRSFGVPLENTFHSPQGLPVSFLHILWGFCTPSRWGLASSEPPLPLGFPSSGCSPYPLGAPRSQVGVFLLGTPQYVLSSLTSGAPLCFPLVCPLSLSLLVLSQVSEHPHFSGSGSPALLSLPLCAPTSVSVVSPLCASCAEGPPLSLLLCLGPLAPPCFFSPSPLSPLLSAPCLPLPFSVFAGSLGL

SEQ ID NO: 6443 - protein, 76 aa, Homo sapiens
LRTRKMKLGGHSWICLLHFQLCSTSQRFLKNEDISALSSGGEVCLASASTLLLFTRCMHALSESGLCFPSRRDHPP

SEQ ID NO: 6444 - protein, 62 aa, Homo sapiens
LGRFVGTLNLSFLLSFQQAALLWLVESGLPGMALTSRPGADLAPGLFQPLLASCFPPPGVQW

SEQ ID NO: 6445 - protein, 31 aa, Homo sapiens
MARAATGAGKATWTLFCWLMAPRACVHKTSS

SEQ ID NO: 6446 - protein, 17 aa, Homo sapiens
VSGTFAMAWTMAVSSSV

SEQ ID NO: 6447 - protein, 42 aa, Homo sapiens
LSFLGFLLSLLGFIPSEPGLAFLGCKLRAGSRSAEPRFSHLP

SEQ ID NO: 6448 - protein, 25 aa, Homo sapiens
MQLQVQWLLLVLQTPLHKPTALSWL

SEQ ID NO: 6449 - protein, 44 aa, Homo sapiens
LGLYLVRCLFYIVPQEQSMSSLMQTDSNCQALICRLTLIINRGP

SEQ ID NO: 6450 - protein, 128 aa, Homo sapiens [sequence omitted]

SEQ ID NO: 6451 - protein, 21 aa, Homo sapiens
LNPVHALVLVLLLLPKILSRD

SEQ ID NO: 6452 - protein, 26 aa, Homo sapiens
MSSARELLLSILLARSFLQEPRNPCE

SEQ ID NO: 6453 - protein, 14 aa, Homo sapiens
VTTCLICLLLTGMQ

SEQ ID NO: 6454 - protein, 125 aa, Homo sapiens
VARPGPWSRASGMSPSPRWGFLCVLFTAVHPAPSTAPVQDKCPVNTWEAMQASSQQLLQTDPRPKPFLLPPLPPLLLISAGTEVSSLVFQKSPLHTQPEGAIKTVGQPTSVHSKVLSKGSLLLGE

SEQ ID NO: 6455 - protein, 116 aa, Homo sapiens
LGGMSPSPRWGFLCVLFTAVHPAPSTAPVQDKCPVNTWEAMQASSQQLLQTDPRPKPFLLPPLPPLLLISAGTEVSSLVFQKSPLHTQPEGAIKTVGQPTSVHSKVLSKGSLLLGE

SEQ ID NO: 6456 - protein, 119 aa, Homo sapiens
LALCQALCWMLGSIVRPGTAKAETNIPTVAHDTKLHRPENGRIHRNERQAVRCPALGRLQKRREDHPSWLTLGGLGSSQIVFLGIYKRVKIDTRNIHLFPFIYLTHTLGAMSSIPRRGS

SEQ ID NO: 6457 - protein, 61 aa, Homo sapiens
LQPPQSQPTLLCLWRAVLLGGSCPAHCRMLKGIPGLHPPLASSSQSDNSQKCLQTLPSLPR

SEQ ID NO: 6458 - protein, 28 aa, Homo sapiens
MTSELLFNSLLNFLSQKAEAQSLETDEH

SEQ ID NO: 6459 - protein, 56 aa, Homo sapiens
MTSELLFNSLLNFLSQKAEAQSLETDAPEFQKLVCMDRFRAVPQSPGPVNKKRHVT

SEQ ID NO: 6460 - protein, 95 aa, Homo sapiens
LRAALGLRSLVCALVRPPVLSTRAWPPDDAGAARAGRGSLRSLLPSAGPLRRSPQFPARTRSGPPNLRPKSGGGSGAVSRGALWNKVELEEQPPR

SEQ ID NO: 6461 - protein, 18 aa, Homo sapiens
MYIFFCMLFGCEELSLLF

SEQ ID NO: 6462 - protein, 84 aa, Homo sapiens
ISLLWTVSLHLMLQKSSLSLLVELTPRSLGFHAWQMARKNCTTFRFQVPKGEAQGQNGNSSMRTQQSTKVGQLHVEESEQIEFA

SEQ ID NO: 6463 - protein, 14 aa, Homo sapiens
MSFIVRLLVSEFVL

SEQ ID NO: 6464 - protein, 87 aa, Homo sapiens
LMTVSLFLLLATSQSQDGCCDSGSCPNSRQQEGHGAAPASRCPCRPSLQAQEPKEESTQMWWLTPVIPPLWEAEARGSLEPRSWRPT

SEQ ID NO: 6465 - protein, 10 aa, Homo sapiens
ILWGLVGMPF

SEQ ID NO: 6466 - protein, 40 aa, Homo sapiens
MSFLRVIFKFKRCSCRCCSIFAVTLRAWRDSSQEVSCSLC

SEQ ID NO: 6467 - protein, 41 aa, Homo sapiens
LTVLLCPLVWWQCGLSATPSGTRARSCSLFSQPGASHQAGV

SEQ ID NO: 6468 - protein, 85 aa, Homo sapiens
VSPGAALLTVLPVPAVARRSAGPAATLATDAGRAATPGSWPPRRLRPPWPSGPQAPPRHPPRTASSARGSPAPCSPSSSWPGSCA

SEQ ID NO: 6469 - protein, 35 aa, Homo sapiens
MCSLGVLLSPPQSPASLPSCPLPKGKNSLEVGRAP

SEQ ID NO: 6470 - protein, 63 aa, Homo sapiens
KKRSPRWSLTMAPACAKLVLLGTTLPEPCFLPSSGAPDTRASWWAWARRTPTWATRPRASVAS

SEQ ID NO: 6471 - protein, 12 aa, Homo sapiens
LLFFFVFPLSSF

SEQ ID NO: 6472 - protein, 76 aa, Homo sapiens
LELRPCVFSRLLIRRGALGAPAWVAVPSVCGPQFLGGAWTLALRGRPVPRSVATDPRTLFAGDSRSLRLPRMMACD

SEQ ID NO: 6473 - protein, 63 aa, Homo sapiens
LSLVKSNIKICLLLILMLPAQQVHQRARMNYGCHECPCEAVGKPWLDCEGYLKSILESTRSSM

SEQ ID NO: 6474 - protein, 26 aa, Homo sapiens
KIPSLHILWVSASVLISLHTPSAFLS

SEQ ID NO: 6475 - protein, 45 aa, Homo sapiens
TGAWWARPRCKAWIAALWLSPQALRAAWSRCCSPSLAHWSPRSAC

SEQ ID NO: 6476 - protein, 33 aa, Homo sapiens
MRTTTPTVLASWPSLTQSTNSTQPTALTSPLTR

SEQ ID NO: 6477 - protein, 47 aa, Homo sapiens
MPRSRRGTGNVSGSCTTWSCSVAWPWPAVPSSYTQQPSCSTSGGSFF

SEQ ID NO: 6478 - protein, 83 aa, Homo sapiens
MPSSLLSLGRSSQQLLQTDPRPKPFLLPPLPPLLLISAGTEVSSLVFQKSPLHTQPEGAIKTVGQPTSVHSKVLSKGSLLLGE

SEQ ID NO: 6479 - protein, 61 aa, Homo sapiens
MGVCPFAFLFCSWNPAGGFDRILGQDLVALPDDPLHSDCPLYPVLLGAPRDTFLASLRGTI

SEQ ID NO: 6480 - protein, 57 aa, Homo sapiens
LPPRACSPPSPRLHPPRSRKRQLRLRGWRRLPPPTTSALAALALRPSPAAAPPPRRR

SEQ ID NO: 6481 - protein, 30 aa, Homo sapiens
LGFANLVALSVSCFSKAAVQKERRYQEGTC

SEQ ID NO: 6482 - protein, 48 aa, Homo sapiens
IICFFALVAPVAWVGPPAPPWQDNLLVSPSLACSSCRACELLTTGSTL

SEQ ID NO: 6483 - protein, 34 aa, Homo sapiens
ILLMLLTTWLLHSHQTRDAILDFPTLICSSPLTL

SEQ ID NO: 6484 - protein, 141 aa, Homo sapiens
KREREREREGEARPGEAGPSGSGLRGRGAGLGAGAGSGAASLSAPALLEPHEPLSPWRARGRGTGARRLLLVKYPSRPETRAASRPREVYSPAPFLKGRNRSFSQRTAFLSAFLALSEIGGPQGWQARLAGLLIFFLISNF

SEQ ID NO: 6485 - protein, 9 aa, Homo sapiens
RAFFFFWVM

SEQ ID NO: 6486 - protein, 33 aa, Homo sapiens
LCFSSLCVLWSLILLYRNSFKNYVITPRIFCNV

SEQ ID NO: 6487 - protein, 120 aa, Homo sapiens
KEAGRRRLHSLARSLASRRRCGSALRFLLAIRSVARARNSSTSAGSELGSGVLRAGGHRARSEPAPHLWSRRPSGEPAGVPPRECSGRRAARAPAEARPPAGRRAHHGAPSARVQRLLPR

SEQ ID NO: 6488 - protein, 35 aa, Homo sapiens
VAKGRRRGLSFRGSLPFLCCRSVTLALSPCLDHFL

SEQ ID NO: 6489 - protein, 88 aa, Homo sapiens
LSQGARKLCHCATWVFFILQSLPQQNRTPQTPSSSLCVALSGSNKSKLWVCECLCVLLFTSHLLKSVYVRGWGVCVKESEEEKEREIN

SEQ ID NO: 6490 - protein, 13 aa, Homo sapiens
LNMTLLLTLTLGG

SEQ ID NO: 6491 - protein, 84 aa, Homo sapiens
IDWVSGAFFFSPLSFFSSVLLHARKLQSAARPPWVRDIQPRSLPCIVQPKDERPKGRKLKKSPTCAGSVHGLGKGIQRRWERRV

SEQ ID NO: 6492 - protein, 88 aa, Homo sapiens
KRAFGARASRGGARSLPVPLPLVISAALGGPGRSETESESPGAKPGETQLRRTPAPLSLLLRPSRGASPSAPRAGELGAQVPAAPGMV

SEQ ID NO: 6493 - protein, 51 aa, Homo sapiens
VYLRVRPILPAGLCLGVTLPELAPTTVATVMLMCDCCQEPAHMTVWRKFFP

SEQ ID NO: 6494 - protein, 50 aa, Homo sapiens
LRQRRPIFLFLLLLSLLNLKTMMKSYIMIYLHLMNNSFPCKVIKVLPRRH

SEQ ID NO: 6495 - protein, 26 aa, Homo sapiens
MCVCVCVCVCVCARAHVHMCVGRWRG

SEQ ID NO: 6496 - protein, 91 aa, Homo sapiens
MVVFPSLSSPTMMTVCSGSVGGRAASGPNPKTKGLCAPTRPPRKEIALPAGWGPLPTVPRLLPTQLRHLPHSGTVEKTAEPPPPFTFQKSV

SEQ ID NO: 6497 - protein, 64 aa, Homo sapiens
LDFTHVLFLIRLLKQKLKKKKQSKRDMTLWSLLILLRRGGKVLAMDLLTVKIPLIIISSRQEIE

SEQ ID NO: 6498 - protein, 33 aa, Homo sapiens
MTAAVSLTRSPAISASCAASRSASPWAWPWTWF

SEQ ID NO: 6499 - protein, 125 aa, Homo sapiens [sequence omitted]

SEQ ID NO: 6500 - protein, 91 aa, Homo sapiens [sequence omitted]

SEQ ID NO: 6501 - protein, 60 aa, Homo sapiens
VPLPKPLGPIHGKRDLPLHLLHAALSPPAAGVAGMGGPAAGGCPAVPEPQVPVKSPGPTH

SEQ ID NO: 6502 - protein, 66 aa, Homo sapiens
LMCTALCWALVLGDRCSVVECVPRNREGAMGARSQGIRNIPPRTHSHLFSNSAYLLNSPDALPVDC

SEQ ID NO: 6503 - protein, 104 aa, Homo sapiens
MAATSACSTFNWKSPHMSWFSLLKICLSSLGGLMHFSVSADQLLPPPNLNGRMRHSGFSYPKRGFFPLFVSIIHFIGRNSVPVNSNWDQRNRVPLLKMAVTRGY

SEQ ID NO: 6504 - protein, 120 aa, Homo sapiens
LSFSLQPLALLIRMKTLLFGVWTLLALILCPGVPEELFEVSIWPSQALVEFGQSLVVNCSTTCPDPGPSGIETFLKKTQVGKGPQWKEFLLEDVTENSILQCFFSCAGIQKDTSLGITVY

SEQ ID NO: 6505 - protein, 70 aa, Homo sapiens
LFGVWTLLALILCPDPGPSGIETFLKKTQVGKGPQWKEFLLEDVTENSILQCFFSCAGIQKDTSLGITVY

SEQ ID NO: 6506 - protein, 119 aa, Homo sapiens
VSLASLLPARAPRPWPPRPLLRRGRDSARRHFWTRLLLSVLFLRAPLQTAAPGTDPPPGLGALLACPGVPASRCARQGSGGVQLHLGRGTGPEGLGGHESLASAAFVFQRGGSDEPLLT

SEQ ID NO: 6507 - protein, 15 aa, Homo sapiens
LCLLDLFFFLVVLRS

SEQ ID NO: 6508 - protein, 34 aa, Homo sapiens
MLLMKTVLGKWFCLLTGFTHGDEALECGHFVLYG

SEQ ID NO: 6509 - protein, 107 aa, Homo sapiens
LVLFLLILPATPRKQSEPKTTDAAAPGTADTAGPGTMDTAVPRKAETAVPGKRNTAVPGTADPASPGTADTAEPMRTTTPTVLASWPSLTQSTNSTQPTALTSPLTR

SEQ ID NO: 6510 - protein, 27 aa, Homo sapiens
MLCTTLQTVCSLILMDIVWARGRDGWL

SEQ ID NO: 6511 - protein, 27 aa, Homo sapiens
VAPTLLGLGSQGLISSSVERAGSTPLL

SEQ ID NO: 6512 - protein, 83 aa, Homo sapiens
LFLFLFLFLWGGATKQTQSILCQVLGWTGQLCVGVVFFSIFLFVSCFLIMFTICLNHSVFYKDSTSSPLSSPLLRPLRLLGDA

SEQ ID NO: 6513 - protein, 27 aa, Homo sapiens
MRRMETLARQCLWAASFAGPPPKPRTS

SEQ ID NO: 6514 - protein, 98 aa, Homo sapiens [sequence omitted]

SEQ ID NO: 6515 - protein, 60 aa, Homo sapiens
VAAAGRRALWFGSAFVSVLLPLPPLLPPLASPAPVCGAAGTQDHVSVSLRGDAPAHGKCL

SEQ ID NO: 6516 - protein, 18 aa, Homo sapiens
MAAPSNKTELAWSPRLAA

SEQ ID NO: 6517 - protein, 82 aa, Homo sapiens
VALSLLTSQGRQRRAGPSTAFAALPATVATFSAMTESESLRTSRHADTALARVRRGAKFRGQARTRYCARARSHRFTPPSGA

SEQ ID NO: 6518 - protein, 23 aa, Homo sapiens
MSFDHPEKNGPWPADPINLPSHG

SEQ ID NO: 6519 - protein, 38 aa, Homo sapiens
LSAPRWGRGAQAGSSENPLRRLPVPAGLRMPGRLICTY

SEQ ID NO: 6520 - protein, 17 aa, Homo sapiens
IPHAGHRWKCQTVRVHA
